(19) United States
(12) Patent Application Publication
(10) Pub. No.: US 2021/0107945 A1
(43) Pub. Date: Apr. 15, 2021

(54) CHIMERIC INSECT-SPECIFIC FLAVIVIRUSES

(71) Applicant: THE UNIVERSITY OF QUEENSLAND, St Lucia, Queensland (AU)

(72) Inventors: Roy HALL, St Lucia, Queensland (AU); Jody HOBSON-PETERS, St Lucia, Queensland (AU); Alexander KHROMYKH, St Lucia, Queensland (AU); Daniel WATTERSON, St Lucia, Queensland (AU); Yin SETOH, St Lucia, Queensland (AU); Thisun PIYASENA, St Lucia, Queensland (AU); Agathe COLMANT, St Lucia, Queensland (AU); Jessica HARRISON, St Lucia, Queensland (AU); Natalee NEWTON, St Lucia, Queensland (AU); Laura VET, St Lucia, Queensland (AU); Helle BIELEFELDT-OHMANN, St Lucia, Queensland (AU)

(21) Appl. No.: 16/497,574

(22) PCT Filed: Sep. 7, 2017
(86) PCT No.: PCT/AU2017/050973

§ 371 Date: Sep. 25, 2019

(30) Foreign Application Priority Data
Mar. 27, 2017 (AU) 2017901093

(51) Int. Cl. C07K 14/005; C12N 7/00; A61K 39/12; A61P 31/14; G01N 33/569

(52) U.S. Cl. CPC C07K 14/005; C12N 7/00; A61K 39/12; A61P 31/14; C12N 2770/24121; C12N 2770/24122; C12N 2770/24152; C12N 2770/24134; G01N 2333/185; G01N 33/56983

(57) ABSTRACT

Chimeric proteins that comprise one or more amino acid sequences of an insect-specific flavivirus and one or more other immunogenic proteins are provided. The chimeric proteins are suitably capable of forming virus particles. The chimeric protein and/or virus particle may be suitable for delivery to a subject to elicit an immune response to a pathogen and/or for diagnosis or detection of a pathogen. Also provided are nucleic acids and vectors encoding the chimeric proteins, and isolated chimeric insect-specific flaviviruses comprising the chimeric proteins and/or nucleic acids.

[0001] This application is the U.S. national phase of International Application No. PCT/AU2017/050973 filed Sep. 7, 2017 which designated the U.S. and claims priority to AU Patent Application No. 2017901093 filed Mar. 27, 2017, the entire contents of each of which are hereby incorporated by reference.

### REFERENCE TO SEQUENCE LISTING SUBMITTED ELECTRONICALLY

[0002] The content of the electronically submitted sequence listing (Name: 0181.0443_Amended_Sequence_Listing.txt; Size: 1.48 megabytes; and Date of Creation: Dec. 4, 2020) filed on Dec. 4, 2020 is incorporated herein by reference in its entirety.

### TECHNICAL FIELD

[0003] THE present invention relates to flaviviruses. More particularly, the invention relates to chimeric insect-specific flaviviruses and proteins thereof, and vectors for expressing said chimeric insect-specific flaviviruses and proteins, useful for the production of vaccines and/or diagnostics.

### BACKGROUND

[0004] The Flavivirus genus of the Flaviviridae family encompasses a diverse array of viruses, which are responsible for a number of significant mosquito-transmitted diseases such as West Nile fever and encephalitis, dengue and Zika fever and Japanese encephalitis. These small enveloped viruses contain a ˜10-11 kb positive sense, single-stranded RNA genome with a single open reading frame (ORF) flanked by 5′ and 3′ untranslated regions (UTRs). The viral ORF is translated into a single polyprotein, and post-translationally cleaved into structural (C, prM and E) and non-structural proteins (NS1-NS5).

[0005] Many flaviviruses are transmitted between mosquitoes and vertebrates, relying on replication in both hosts for maintaining their natural transmission cycle. However, in recent years, a number of flaviviruses, referred to as insect-specific flaviviruses (ISFs), which replicate exclusively in arthropods with no requirement for a vertebrate intermediate, have been discovered. The advent of improved genome sequencing methods such as deep sequencing, sensitive reverse transcription (RT) PCR assays using flavivirus generic primers and the development of broad-spectrum diagnostic tools, such as monoclonal antibodies (mAbs) to viral dsRNA intermediates, have seen the isolation of several other ISFs from various regions around the world.

[0006] Several vaccine types are currently in common use, including those for vaccination against flavivirus infection. These include inactivated and attenuated vaccines. However, current vaccines can be associated with certain disadvantages. For example, inactivated vaccines may induce only a moderate or partial immune response, and require multiple doses or ‘boosters’. Inactivation may also modify the antigen or destroy epitopes. Additionally, inactivation treatment can be relatively technically demanding and/or expensive. There is also a risk that the inactivation may be incomplete. Furthermore, while attenuated vaccines typically induce a robust immune response, these can be at risk of ‘reversion’ to pathogenicity.

[0007] In addition to use in vaccines, proteins comprising immunogenic sequences can be used in a diagnostic setting, e.g. for detection of flaviviral antibodies in human or animal subjects. Inactivated and/or attenuated viruses have been used in this context, and can offer advantages over recombinant antigens generated from viral subunits in terms of reactivity, although subunit antigens such as domain III of the flavivirus envelope protein typically confer superior specificity. However, similar issues as described above in regard to vaccines can apply in this context.

[0008] As such, there is presently a need for new vaccination approaches, including for immunization against flaviviruses. Strategies offering simpler, more efficient, safer and/or more cost effective vaccine production are also highly desirable. Similarly, there is a need for new approaches for diagnostics for viral infection.

### SUMMARY

[0009] The invention is broadly directed to chimeric proteins that comprise one or more amino acid sequences of an insect-specific flavivirus and one or more other immunogenic proteins. Suitably, the chimeric protein is capable of forming a virus particle. In certain embodiments the chimeric protein and/or virus particle may be suitable for delivery to a subject to elicit an immune response to a pathogen and/or for diagnosis or detection of a pathogen.

[0010] In a first aspect, the invention provides an isolated protein comprising:

[0011] (i) an amino acid sequence of a protein encoded by the genome of an insect-specific flavivirus; and

[0012] (ii) an immunogenic amino acid sequence not encoded by the genome of an insect-specific flavivirus.

[0013] Said amino acid sequences may be any suitable amino acid sequence, or encoded by any suitable nucleotide sequence, set forth in FIGS. 1-901 disclosed herein. Said amino acid sequences may be any suitable amino acid sequence, or encoded by any suitable nucleotide sequence, set forth in SEQ ID NOS:1-405 presented herein.

[0014] In certain particularly preferred embodiments, the isolated protein of this aspect is or comprises an amino acid sequence set forth in SEQ ID NOS:1-4, or SEQ ID NOS:32, 389, 391 or 395, or a fragment, variant, or derivative thereof.

[0015] In embodiments, the isolated protein of this aspect is or comprises an amino acid sequence set forth in SEQ ID NOS:20, 22, 24, 26, 28, 30, 32, 384, 393, 397, or 402-405 a fragment or variant thereof.

[0016] In preferred embodiments, the insect-specific flavivirus of (i) is capable of infecting a plurality of different insects. In an embodiment, the insect-specific flavivirus is capable of infecting a plurality of different species of insects. In a preferred embodiment, the first insect-specific flavivirus of (i) is capable of infecting a plurality of different genera of insects.

[0017] In certain preferred embodiments, the insect-specific flavivirus of (i) has a native host selected from the group consisting of Coquillettidia spp.; Aedes spp.; Anopheles spp.; Mansonia spp.; Toxorhynchites spp.; Aedeomyia spp.; and Culex spp.

[0018] Preferably, the insect-specific flavivirus of (i) is selected from the group consisting of Palm Creek virus (PCV); Binjari virus (BinJV); Lilly Creek virus (LiCV); and Bamaga virus (BgV).

[0019] In embodiments, the insect-specific flavivirus of (i) may be selected from the group consisting of Parramatta River virus (PaRV), Cell fusing agent virus (CFAV), and Karumba virus (KRBV).

[0020] In particularly preferred embodiments, (i) comprises an amino acid sequence set forth in SEQ ID NOS:5-7 or 387, or a fragment, variant, or derivative thereof. In embodiments, (i) may comprise an amino acid sequence set forth in SEQ ID NOS:17-19.

[0021] Suitably, the immunogenic amino acid sequence (ii) of the protein of this aspect is of any protein not encoded by the genome of an insect-specific flavivirus that is capable of eliciting an immune response in an animal. Preferably, the immunogenic amino acid sequence (ii) is of a protein encoded by the genome of a flavivirus that is not insect-specific.

[0022] In preferred embodiments, the immunogenic amino acid sequence (ii) is of a structural protein of a flavivirus that is not insect-specific. Suitably, the structural protein is selected from the group consisting of a Capsid; prM; and Envelope protein. Preferably, the structural protein is a prM protein and/or an Envelope protein.

[0023] In one preferred embodiment, the immunogenic amino acid sequence (ii) is of one or more of an EDI, EDII, and EDIII domain of an E protein of a flavivirus that is not insect-specific.

[0024] Additionally or alternatively, the immunogenic amino acid (ii) sequence may be of a non-structural protein of the flavivirus. Suitably, the non-structural protein is selected from the group consisting of an NS1; NS2A; NS2B; NS3; NS4A; NS4B; and NS5 protein.

[0025] In certain preferred embodiments, the immunogenic amino acid sequence (ii) is of a vertebrate-infecting flavivirus. More preferably, the sequence is of a mammal, reptile or avian-infecting flavivirus. In one particularly preferred embodiment, the sequence is of a human-infecting flavivirus.

[0026] Preferably, the immunogenic sequence (ii) is of a flavivirus selected from the group consisting of Zika virus (ZIKV); West Nile virus (WNV); Dengue virus (DENY); Japanese encephalitis virus (JEV); Yellow fever virus (YFV); tick-borne encephalitis virus (TBEV); St Louis encephalitis virus (SLEV); Murray valley encephalitis virus (MVEV); Duck tembusu virus; Turkey Meningoencephalitis Virus (TMEV); Usutu virus; Sepik virus; Wesselsbron virus; Baiyangdian Virus (BYD); and Sitiawan Virus (SV). In a particularly preferred embodiment, the immunogenic sequence of (ii) is of Zika virus; West Nile virus; or Dengue virus.

[0027] In particularly preferred embodiments, (ii) is or comprises an amino acid sequence set forth in SEQ ID NOS:8-10, or a fragment, variant, or derivative thereof.

[0028] A second aspect provides an isolated nucleic acid encoding the amino acid sequence of the isolated protein of the first aspect.

[0029] The isolated nucleic acid of this aspect will comprise a nucleotide sequence of the genome of an insect-specific flavivirus; and a nucleotide sequence encoding an immunogenic amino acid sequence, wherein the immunogenic nucleotide sequence is not of an insect-specific flavivirus.

[0030] Preferably, the nucleotide sequence of the isolated nucleic acid of this aspect that is of the genome of the insect-specific flavivirus is of an insect-specific flavivirus capable of infecting a plurality of different insects. In certain preferred embodiments, said insect-specific flavivirus has a native host selected from the group consisting of Coquillettidia spp.; Aedes spp.; Anopheles spp.; Mansonia spp.; Toxorhynchites spp.; Aedeomyia spp.; and Culex spp. Preferably, said insect-specific flavivirus is selected from the group consisting of PCV; BinJV; LiCV; and BgV. In embodiments, the insect-specific flavivirus may be selected from the group consisting of KRBV, PaRV, and CFAV.

[0031] In preferred embodiments of the isolated nucleic acid of this aspect, the nucleotide sequence that encodes the immunogenic amino acid sequence encodes a protein of a flavivirus that is not insect-specific.

[0032] In preferred embodiments, said immunogenic amino acid sequence is of at least part of a structural protein of a flavivirus that is not insect-specific. Suitably, the structural protein is selected from the group consisting of a Capsid; prM; and Envelope protein. Preferably, the structural protein is a prM protein and/or an Envelope protein.

[0033] Additionally or alternatively, said nucleotide sequence encoding the immunogenic amino acid sequence may encode a non-structural protein of a flavivirus that is not insect specific. Suitably, the non-structural protein is selected from the group consisting of an NS1; NS2A; NS2B; NS3; NS4A; NS4B; and NS5 protein.

[0034] Preferably, said nucleotide sequence of the isolated nucleic acid of this aspect encoding the immunogenic amino acid sequence encodes an immunogenic amino acid sequence of a flavivirus selected from the group consisting of ZIKV; WNV; DENY; JEV; YFV; TBEV; SLEV; MVEV; Duck tembusu virus; TMEV; Usutu virus; Sepik virus; Wesselsbron virus; BYD; and Sitiawan Virus (SV). In a particularly preferred embodiment, said virus is selected from the group consisting of WNV; Zika virus; and Dengue virus.

[0035] In some embodiments, the isolated nucleic acid of this aspect is capable of replicating an isolated chimeric insect-specific flavivirus comprising the isolated protein of the first aspect.

[0036] In a third aspect, the invention provides a genetic construct comprising the isolated nucleic acid of the second aspect.

[0037] In a fourth aspect, the invention provides a host cell comprising the genetic construct of the third aspect.

[0038] A fifth aspect of the invention provides an isolated chimeric insect-specific flavivirus comprising the isolated protein of the first aspect; and the isolated nucleic acid of the second aspect, wherein the isolated nucleic acid is capable of replicating the isolated chimeric insect-specific flavivirus.

[0039] In a sixth aspect, the invention provides a vector comprising:

[0040] (i) the isolated nucleic acid of the second aspect; and

[0041] (ii) an insect-specific promoter operably connected to the isolated nucleic acid (i).

[0042] In particularly preferred embodiments, the vector of this aspect is or comprises a nucleotide sequence set forth in SEQ ID NOS:11-14 or SEQ ID NOS:33, 388, 390, 398, or 399, or a fragment or variant thereof.

[0043] In alternative embodiments, the vector of this aspect is or comprises a nucleotide sequence set forth in SEQ ID NOS:21, 23, 25, 27, 29, 31, 385, 392, or 396, or a fragment or variant thereof.

[0044] In preferred embodiments of this aspect, the isolated nucleic acid (i) is capable of replicating an isolated chimeric insect-specific flavivirus comprising the isolated protein of the first aspect.

[0045] In preferred embodiments of the vector of this aspect, the insect-specific promoter (ii) is of an insect virus. In particularly preferred embodiments, said virus is selected from the group consisting of Orgyia pseudotsugata multicapsid nucleopolyhedrosis virus (OpMNPV); Autographa californica nucleopolyhedrovirus (AcMNP); and Spodoptera exigua multiple nucleopolyhedrovirus (SeMNPV).

[0046] In preferred embodiments, the insect promoter (ii) is or comprises a nucleotide sequence set forth in SEQ ID NOS:15-16 or SEQ ID NOS:382-383, or a fragment or variant thereof.

[0047] In a particularly preferred embodiment, the insect promoter (ii) is or comprises a nucleotide sequence set forth in SEQ ID NOS:15-16, or a fragment or variant thereof. Preferably, the insect promoter of (ii) is or comprises SEQ ID NO:16.

[0048] In certain embodiments, the vector of this aspect further comprises one or more small RNA target sequences, for regulation of replication of an isolated chimeric insect-specific flavivirus comprising the isolated protein of the first aspect in one or more cells, preferably one or more mosquito cells. Preferably, the one or more small RNA target sequences prevent or constrain replication of the chimeric insect-specific flavivirus in one or more cells of the midgut of a mosquito.

[0049] In a seventh aspect, the invention provides a method of producing a vector, the method including the step of operably connecting the isolated nucleic acid of the second aspect with an insect-specific promoter, to thereby produce the vector.

[0050] In preferred embodiments, the method of the seventh aspect includes the step of joining at least two nucleic acids using a nucleic acid amplification technique, to thereby produce the vector.

[0051] In preferred embodiments, the method includes the step of joining a nucleic acid comprising the insect-specific promoter with a plurality of nucleic acids which together form the isolated nucleic acid of the second aspect.

[0052] Preferably, each of the plurality of nucleic acids that is joined according to the method of this aspect comprises nucleotide sequence overlap with respect to an adjacent nucleic acid.

[0053] In an eighth aspect, there is provided a vector produced according to the method of the seventh aspect. Preferably, the vector is of the sixth aspect.

[0054] In a ninth aspect, there is provided an isolated protein produced from the vector of the sixth or eighth aspects. Preferably, said protein is the protein of the first aspect.

[0055] In a tenth aspect there is provided an isolated chimeric insect-specific flavivirus produced from the vector of the sixth or eighth aspects. Preferably, said flavivirus is of the fifth aspect.

[0056] In an eleventh aspect, there is provided a method of producing an isolated chimeric insect-specific flavivirus comprising an isolated protein of the first aspect, the method including the steps of:

[0057] (a) combining a vector comprising (i) a nucleotide sequence capable of replicating a chimeric insect-specific flavivirus comprising the isolated protein of the first aspect; and (ii) an insect-specific promoter operably connected to (i), with an insect cell; and

[0058] (b) allowing the chimeric insect-specific flavivirus replicable by (i) to replicate in the insect cell,

[0059] to thereby produce the isolated chimeric insect-specific flavivirus comprising the isolated protein of the first aspect.

[0060] Preferably, the vector according to step (a) of this aspect, is the vector of the sixth or eighth aspects.

[0061] Preferably, combining the vector with the insect cell according to this aspect is in the form of transfection of the insect cell with the vector.

[0062] Preferably, the insect cell of this aspect is a mosquito cell or a fly cell. In preferred embodiments, the mosquito cell is an Aedes cell, preferably a C6/36 cell or C7/10 cell. In preferred embodiments, the fly cell is a Drosophila cell, preferably a S2 cell.

[0063] In preferred embodiments of the method of this aspect, the flavivirus is produced in the insect cell at a titre of at least: 10⁴/ml; 10⁵/ml; 10⁶/ml; 10⁷/ml; or 10⁸/ml. In one particularly preferred embodiment, the flavivirus is produced in the insect cell at a titre of greater than 10⁷/ml.

[0064] A twelfth aspect of the invention provides a method of modifying a chimeric insect-specific flavivirus, a protein of a chimeric insect-specific flavivirus, and/or a nucleic acid of a chimeric insect-specific flavivirus, including the step of replicating a chimeric insect-specific flavivirus in a cell, whereby one or more mutations are incorporated into the chimeric insect-specific flavivirus, a protein thereof, and/or nucleotide sequence thereof, to thereby modify the chimeric insect-specific flavivirus, protein thereof, and/or nucleic acid thereof.

[0065] Preferably, the step of replicating the chimeric insect-specific flavivirus according to the method of this aspect includes a plurality of replication cycles. Preferably, the chimeric insect-specific flavivirus is replicated in an insect cell, preferably a mosquito cell.

[0066] Preferably, the method of this aspect improves or enhances efficiency of replication of the chimeric insect specific flavivirus in one or more cells. Preferably, said one or more cells are insect cells, preferably mosquito cells. In a thirteenth aspect, there is provided an isolated chimeric insect-specific flavivirus, or a protein or nucleic acid thereof, produced according to the method of the eleventh or twelfth aspect. Preferably, said flavivirus is of the fifth or tenth aspect.

[0067] A fourteenth aspect of the invention provides a composition comprising the isolated protein of the first or ninth aspects, and/or the isolated flavivirus of the fifth, tenth or thirteenth aspects, and one or more carriers, diluents, or excipients.

[0068] In certain preferred embodiments of the thirteenth aspect, the composition is a pharmaceutical composition. Preferably, the pharmaceutical composition is a vaccine. In these embodiments, the one or more carriers, diluents, or excipients will be pharmaceutically acceptable carriers, diluents, or excipients.

[0069] In certain preferred embodiments of the fourteenth aspect, the composition is a diagnostic composition. The diagnostic composition may be for in vivo or in vitro use. Preferably, the diagnostic composition is for in vitro use. In an embodiment, the diagnostic composition may be, or may be a component of, a diagnostic kit.

[0070] A fifteenth aspect of the invention provides a method of eliciting an immune response in a subject, the method including the step of administering an effective amount of a pharmaceutical composition according to the fourteenth aspect to the subject, to thereby elicit an immune response in the subject.

[0071] A sixteenth aspect of the invention provides a method of immunizing a subject against a pathogen, the method including the step of administering an effective amount of the pharmaceutical composition of the fourteenth aspect to the subject, to thereby immunize the subject against the pathogen.

[0072] A seventeenth aspect of the invention provides a method of treating or preventing a disease, disorder, or condition in a subject, the method including the step of administering an effective amount of the pharmaceutical composition of the fourteenth aspect to the subject, to thereby treat or prevent the disease, disorder or condition in the subject.

[0073] Preferably, the subject of the fifteenth, sixteenth, and/or seventeenth aspects is an animal subject, preferably an invertebrate subject. In one preferred embodiment, said subject is a human subject. In other preferred embodiments, said subject is a reptile or avian subject.

[0074] Preferably, the disease, disorder, or condition according is associated with viral infection. Preferably, the disease, disorder, or condition is selected from the group consisting of Zika virus; West Nile virus; and Dengue virus.

[0075] An eighteenth aspect of the invention provides a method of detecting, identifying or screening for an antibody in a sample, the method including the steps of combining the diagnostic composition of the fourteenth aspect with a sample, wherein binding of an antibody in the sample to an immunogenic amino acid sequence of the isolated protein or isolated chimeric insect-specific flavivirus of the diagnostic composition facilitates detecting, identifying or screening for the antibody in the sample.

[0076] In a preferred embodiment, screening for the antibody according to the method of the seventeenth aspect is performed using an enzyme-linked immunosorbent assay (ELISA). The ELISA may be a direct ELISA or an indirect ELISA.

[0077] In a preferred embodiment, screening for the antibody according to the method of the seventeenth aspect is performed using a lateral flow immunoassay.

[0078] Preferably, the antibody according to the seventeenth aspect is, or has been, produced in response to a viral infection. Preferably, the viral infection is caused by or associated with a virus selected from the group consisting of: Zika virus; West Nile virus; and Dengue virus.

[0079] It will be appreciated that the indefinite articles “a” and “an” are not to be read as singular indefinite articles or as otherwise excluding more than one or more than a single subject to which the indefinite article refers. For example, “a” protein includes one protein, one or more proteins or a plurality of proteins.

[0080] As used herein, unless the context requires otherwise, the words “comprise”, “comprises” and “comprising” will be understood to mean the inclusion of a stated integer or group of integers but not the exclusion of any other integer or group of integers.

### BRIEF DESCRIPTION OF THE FIGURES

[0081] In order that the invention may be readily understood and put into practical effect, preferred embodiments will now be described by way of example with reference to the accompanying figures, wherein:

[0082] FIG. 1 illustrates general flavivirus virion structure.

[0083] FIG. 2 provides a schematic of flavivirus replication.

[0084] FIG. 3 provides a schematic of the generation of vectors of the invention using Circular Polymerase Extension Cloning (CPEC) and generation of insect-specific flaviviruses therefrom.

[0085] FIG. 4 illustrates the structure of a preferred insect-specific flavivirus of the invention, wherein the insect-specific flavivirus comprises amino acid sequence of a first insect-specific flavivirus (Capsid and NS1, NS2A, NS2B, NS3, NS4A, NS4B, and NS5 amino acid sequence from Palm Creek virus) and an immunogenic sequence of a second flavivirus (prM and Envelope amino acid sequence from West Nile virus, KUNV subtype). Native Palm Creek virus and West Nile virus are illustrated for reference (top).

[0086] FIG. 5 illustrates OpIE2 promoter optimisation. (a) Schematic of the 3′ termini of the OpIE2 (SEQ ID NO:15) and OpIE2-CA (SEQ ID NO:16) promoters; (b) TCID₅₀ of P₀ supernatants from C6/36 cells transfected with WNV_{KUN} CPEC containing either the OpIE2 or OpIE2-CA promoter (n=3 biological replicates for each construct). Supernatants harvested 5 days post-transfection indicate that the OpIE2-CA promoter yields approximately 100-fold higher titres than the OpIE2 promoter. Error bars represent standard deviation and asterisks indicate significance (P value>0.05; two-tailed t-test).

[0087] FIG. 6 illustrates generation of PaRV using CPEC. (a) A schematic representation for the assembly of infectious DNA for PaRV by CPEC reaction; (b) Visualisation of PaRV replication in mosquito (C6/36) cell monolayers inoculated with either an MOI of 0.1 PaRV_{WT} or undiluted P₀ PaRV_{CPEC}. Monolayers were fixed 72 hrs post-infection. IFA analysis was performed by probing with PaRV mouse anti-sera. The nucleus of each cell was stained with Hoechst 33342. Images were taken at ×40 magnification.

[0088] FIG. 7 illustrates components of a nucleic acid comprising an insect-specific promoter (OpIE2) used for generation of a preferred vector of the invention by CPEC.

[0089] FIG. 8 sets forth results of phenotypic analysis of PaRV_{WT} and PaRV_{CPEC}. (a) Comparative growth kinetics of PaRV_{WT}, PaRV_{CPEC} and WNV_{KUN} in C6/36 cells. C6/36 cells were infected with either PaRV_{WT}, PaRV_{CPEC} or WNV_{KUN} at an MOI of 0.1. Infectious titres at each time point were determined by titration of culture supernatant on to fresh C6/36 cells with infection detected using fixed cell ELISA. Error bars represent standard deviation and asterisks indicate significance (P value>0.001) as determined by a two-way ANOVA. (b) Comparison of reciprocal titres for the reactivity of a panel of anti-PaRV (5B7, 2G3, 2G10, 7D11, 3G7, 5D8, 2D2 and 1E5) and anti-PCV control (5G12) mAbs to PaRV_{WT} and PaRV_{CPEC}.

[0090] FIG. 9 sets forth visualisation of WT and IFNAR^{-/-} MEF cells infected with either WNV_{KUN} or PaRV at an MOI of 0.1. Monolayers were fixed 72 hrs post-infection. IFA analysis was performed by probing with anti-PaRV (7D11), anti-WNV_{KUN} (3.91D) and anti-dsRNA (3G1) mouse antibodies. The nucleus of each cell was stained with Hoechst 33342. Images were taken at ×40 magnification.

[0091] FIG. 10 sets forth replication of chimeric flaviviruses. (a) Visualisation of C6/36 cells transfected with CPEC constructs of either WNV_{KUN}, PaRV, WNV_{KUN}/PaRV-prME or PaRV/WNV_{KUN}-prME chimeras. IFA analysis was performed by probing with anti-PaRV (7D11), anti-WNV_{KUN} E (3.91D) and anti-WNV_{KUN} NS1 (3.1112G) mouse antibodies. (b) Visualisation of C6/36 cells transfected with a chimeric CPEC construct of WNV_{KUN}/CFAV-prME. IFA analysis was performed by probing with anti-dsRNA (3G1), anti-WNV E (4G2) and anti-WNV NS1 (4G4) mouse antibodies. (c) Visualisation of C6/36 cells transfected with a chimeric CPEC construct of WNV_{KUN}/PCV-prME. IFA analysis was performed by probing with anti-PCV E (5G12), anti-PCV NS1 (9G4/3D6), anti-WNV_{KUN} E (3.91D) and anti-WNV_{KUN} NS1 (3.1112G) mouse antibodies. Monolayers were fixed 5 days post-transfection. The nucleus of each cell was stained with Hoechst 33342. Images were taken at ×40 magnification.

[0092] FIG. 11 sets forth host range of various flavivirus types.

[0093] FIG. 12 sets forth SEQ ID NO:1 in FASTA format.

[0094] FIG. 13 sets forth SEQ ID NO:2 in FASTA format.

[0095] FIG. 14 sets forth SEQ ID NO:3 in FASTA format.

[0096] FIG. 15 sets forth SEQ ID NO:4 in FASTA format.

[0097] FIG. 16 sets forth SEQ ID NO:5 in FASTA format.

[0098] FIG. 17 sets forth SEQ ID NO:6 in FASTA format.

[0099] FIG. 18 sets forth SEQ ID NO:7 in FASTA format.

[0100] FIG. 19 sets forth SEQ ID NO:8 in FASTA format.

[0101] FIG. 20 sets forth SEQ ID NO:9 in FASTA format.

[0102] FIG. 21 sets forth SEQ ID NO:10 in FASTA format.

[0103] FIG. 22 sets forth SEQ ID NO:11 with nucleotide sequence numbering.

[0104] FIG. 23 sets forth SEQ ID NO:12 with nucleotide sequence numbering.

[0105] FIG. 24 sets forth SEQ ID NO:13 with nucleotide sequence numbering.

[0106] FIG. 25 sets forth SEQ ID NO:14 with nucleotide sequence numbering.

[0107] FIG. 26 sets forth SEQ ID NO:17 in FASTA format.

[0108] FIG. 27 sets forth SEQ ID NO:18 in FASTA format.

[0109] FIG. 28 sets forth SEQ ID NO:19 in FASTA format.

[0110] FIG. 29 sets forth SEQ ID NO:20 in FASTA format.

[0111] FIG. 30 sets forth SEQ ID NO:21 with nucleotide sequence numbering.

[0112] FIG. 31 sets forth SEQ ID NO:22 in FASTA format.

[0113] FIG. 32 sets forth SEQ ID NO:23 with nucleotide sequence numbering.

[0114] FIG. 33 sets forth SEQ ID NO:24 in FASTA format.

[0115] FIG. 34 sets forth SEQ ID NO:25 with nucleotide sequence numbering.

[0116] FIG. 35 sets forth SEQ ID NO:26 in FASTA format.

[0117] FIG. 36 sets forth SEQ ID NO:27 with nucleotide sequence numbering.

[0118] FIG. 37 sets forth SEQ ID NO:28 in FASTA format.

[0119] FIG. 38 sets forth SEQ ID NO:29 with nucleotide sequence numbering.

[0120] FIG. 39 sets forth SEQ ID NO:30 in FASTA format.

[0121] FIG. 40 sets forth SEQ ID NO:31 with nucleotide sequence numbering.

[0122] FIG. 41 sets forth SEQ ID NO:32 in FASTA format.

[0123] FIG. 42 sets forth SEQ ID NO:33 with nucleotide sequence numbering.

[0124] FIG. 43 sets forth SEQ ID NO:34 with nucleotide sequence numbering.

[0125] FIG. 44 sets forth SEQ ID NO:35 with nucleotide sequence numbering.

[0126] FIG. 45 sets forth SEQ ID NO:36 with nucleotide sequence numbering.

[0127] FIG. 46 sets forth SEQ ID NO:37 with nucleotide sequence numbering.

[0128] FIG. 47 sets forth SEQ ID NO:38 with nucleotide sequence numbering.

[0129] FIG. 48 sets forth SEQ ID NO:39 with nucleotide sequence numbering.

[0130] FIG. 49 sets forth SEQ ID NO:40 with nucleotide sequence numbering.

[0131] FIG. 50 sets forth SEQ ID NO:41 with nucleotide sequence numbering.

[0132] FIG. 51 sets forth SEQ ID NO:42 with nucleotide sequence numbering.

[0133] FIG. 52 sets forth SEQ ID NO:43 with nucleotide sequence numbering.

[0134] FIG. 53 sets forth SEQ ID NO:44 with nucleotide sequence numbering.

[0135] FIG. 54 sets forth SEQ ID NO:45 with nucleotide sequence numbering.

[0136] FIG. 55 sets forth SEQ ID NO:46 with nucleotide sequence numbering.

[0137] FIG. 56 sets forth SEQ ID NO:47 with nucleotide sequence numbering.

[0138] FIG. 57 sets forth SEQ ID NOS:382-383 in FASTA format.

[0139] FIG. 58 sets forth a time-course of infection of C6/36 cells by CPEC-derived PCV.

[0140] FIG. 59 sets forth SEQ ID NO:384 in FASTA format.

[0141] FIG. 60 sets forth SEQ ID NO:385 with nucleotide sequence numbering.

[0142] FIG. 61 illustrates the structure of a chimeric E protein comprising an immunogenic EDIII domain. Flavivirus E protein has 3 domains: DI, DII and DIII (A). ISF-VIF EDIII chimeras will produce virions comprising ISF structural proteins, except for VIF EDIII (blue, B).

[0143] FIG. 62 sets forth SEQ ID NO:386 in FASTA format.

[0144] FIG. 63 sets forth SEQ ID NO:387 in FASTA format.

[0145] FIG. 64 sets forth SEQ ID NO:388 in FASTA format.

[0146] FIG. 65 sets forth SEQ ID NO:389 in FASTA format.

[0147] FIG. 66 sets forth SEQ ID NO:390 in FASTA format.

[0148] FIG. 67 sets forth SEQ ID NO:391 in FASTA format.

[0149] FIG. 68 sets forth SEQ ID NO:392 in FASTA format.

[0150] FIG. 69 sets forth SEQ ID NO:393 in FASTA format.

[0151] FIG. 70 sets forth SEQ ID NO:394 in FASTA format.

[0152] FIG. 71 sets forth SEQ ID NO:395 in FASTA format.

[0153] FIG. 72 sets forth SEQ ID NO:396 in FASTA format.

[0154] FIG. 73 sets forth SEQ ID NO:397 in FASTA format.

[0155] FIG. 74 sets forth nucleotide (non-bold) and amino acid (bold) sequence similarity (percentage) between lineage II ISFs (dISFs) over ORF sequences. For BinJV and LiCV (labelled LLCFC), ORF sequences were as described herein. For the remaining lineage II ISFs, ORF sequence were obtained from the following Genbank references: EU159426 (NOUV), KC692068 (LAMV), JQ308185 (CHAOV), KC692067 (ILOV), KX359172 (PANFV), NC_016997 (DONV), JN603190 (MMV), JX627335 (NANV), KJ210048 (NHUV), KC496020 (BJV).

[0156] FIG. 75 sets forth nucleotide and amino acid sequence similarity (percentage) of lineage I ISFs (cISFs) over ORF sequences. Top-right half of the table is amino acid sequence similarity and bottom left half is nucleotide sequence similarity. PaRV: Parramatta River virus; CFAV: Cell fusing agent virus; CxFV: Culex flavivirus; QBV: Quang Binh virus; PCV: Palm Creek virus.

[0157] FIG. 76 sets forth a maximum likelihood analysis over ORF amino acid sequences for phylogenetic assessment of Lilly Creek virus (labelled LiLV) compared to BinJV as described herein and the sequences obtained from the following Genbank references (with virus name in brackets): AB488408 (AEFV); AY898809 (ALFV); KF917535 (AROAV); KM225264 (Bainyik virus); DQ859056 (BANV); KU308380 (BgV); (LLCFV); KC496020 (BJV); KJ741267 (CFAV); JQ308185 (CHAOV); HE574574 (CTFV); U88536 (DENY-1); U87411 (DENY-2); AY099336 (DENY-3); AF326825 (DENY-4); DQ859060 (EHV); DQ837641 (ENTV); DQ235145 (GGYV); NC_030401 (HANKY); KC692067 (ILOV); M18370 (JEV); DQ859066 (JUGV); AY632541 (KOKV); AY149905 (KRV); KC692068 (LAMV); KC692067 (LIV); AJ242984 (MODV); AF161266 (MVEV); NC_030400 (NAKV); KJ210048 (NHUV); JQ957875 (NIEV); KC788512 (NMV); EU159426 (NOUV); AY193805 (OHFV); KT192549 (PaRV); KC505248 (PCV); DQ859067 (POTV); L06436 (POWV); FJ644291 (QBV); NC_003675 (RBV); DQ859062 (SABV); DQ837642 (SEPV); DQ525916 (SLEV); DQ859064 (SPOV); DQ235150 (SREV); KM225263 (STRV); U27495 (TBEV); KM225265 (Torres virus); DQ859065 (UGSV); JN226796 (WESSV); KY229074 (WNV); X03700 (YFV); AB114858 (YOKV); AY632535 (ZIKV).

[0158] FIG. 77 sets forth analysis of LiCV growth in mosquito (C6/36, mos55) and vertebrate (BSR, Vero) cell lines. West Nile virus (WNV_{KUN}) is also included as a control.

[0159] FIG. 78 sets forth amino acid similarity of BinJV and LiCV envelope proteins in comparison to vertebrate-infecting flavivirus envelope proteins.

[0160] FIG. 79 sets forth a comparison of the growth of BinJV and associated chimeras to that of PCV and an associated chimera.

[0161] FIG. 80 sets forth an assessment of BinJV host restriction. (A) Immunofluorescence images of BinJV, WNV_{KUN}, and Mock inoculated insect cells lines (S2, mos55, HSU, Chao Ball, RML-12, and C636). (B) Immunofluorescence images of BinJV (bottom), WNV_{KUN} (middle), and Mock (top) inoculated vertebrate cell lines (BSR, DF-1, Vero, OK, SW-13, MEF wild type, and MEF IFNAR⁴⁻). A tabulated summary of replication results in (A) and (B) is provided at the top of the figure.

[0162] FIG. 81 sets forth an assessment of host restriction of the BinJV-WNV_{KUN}-prME chimeric ISF vector at standard temperature (37° C.) and lowered temperature (34° C.). (A) Immunofluorescence images of BinJV, WNV_{KUN}, BinJV/WNV_{KUN}-prME, and Mock inoculated cell lines C6/36 (mosquito); and BSR, Vero, MEF_{WT} and MEF_{IFNAR}^{-/-} (vertebrate) at 37° C. (B) Immunofluorescence images of BinJV, WNV_{KUN}, BinJV/WNV_{KUN}-prME, and Mock inoculated cell lines C6/36 (mosquito); and BSR, Vero, MEF_{WT} and MEF_{IFNAR}^{-/-} (vertebrate) at 34° C.

[0163] FIG. 82 sets forth an assessment of replication of BinJV/DENV1-prME (labelled BinJV-DENV_{prME}) and BinJV/ZIKV-prME (labelled BinJV-ZIKVprME) in mosquito cells. Top: results of staining (green) of mosquito cells inoculated with chimeric ISFs using an anti-DENY or anti-ZIKV E protein antibody (top); and an anti-BinJV E protein (bottom).

[0164] FIG. 83 sets forth an assessment of mutation of EDII fusion loop in BinJV and LiCV. (A) An alignment of E domain II residues (blue box) in BinJV, LiCV and other flaviviruses. Conserved residues are highlighted. Fusion loop is indicated by red box. BinJV and LiCV sequences used were as described herein. Sequence for the other flaviviruses was obtained from the following Genbank references: KC692068 (LAMV); JQ308185 (CHAOV); KC692067 (ILOV); EU159426 (NOUV); KJ210048 (NHUV); KC496020 (BJV); X03700 (YFV); U88536 (DENY-1); AY632535 (ZIKV); M18370 (JEV); KY229074 (WNV). (B) Immunofluorescence analysis of 4G2 detection of wild-type BinJV (BinJV_{WT} V106) and BinJV with key mutated residue (BinJV_{V106G}).

[0165] FIG. 84 sets forth immunofluorescent confirmation of the successful production of a BinJV/WNVEDI (labelled BinJV-WNV_{EDI}) chimera wherein a 19 amino acid peptide from the WNV E protein was inserted into the homologous region of DI of BinJV. For comparison BinJV/WNV_{KUN}-prME (labelled BinJV-WNV_{STR}) is included. Interpretation of the staining is indicated in the bottom right-hand corner of each image.

[0166] FIG. 85 sets forth (A) immunofluorescent confirmation of production of PCV/Vertebrate-Infecting Flavivirus(VIF)-prME chimeras PCV/DENV-prME (labelled PCV-DENV_{STR}), PCV/ZIKV-prME (labelled PCV-ZIKV_{STR}), and PCV/WNV_{KUN}-prME (labelled PCV-WNV_{STR}) in C6/36 mosquito cells; and (B) exemplary assessment of replication of PCV/VIF-prME chimeras in comparison with replication of PCV and the applicable VIF in C6/36 mosquito cells; specifically, replication of PCV, DENV, and PCV/DENV-prME (labelled PCV-DENV_{STR}); and replication of PCV, ZIKV, and PCV/ZIKV-prME (labelled PCV-ZIKV_{STR}) (bottom) is shown.

[0167] FIG. 86 sets forth growth kinetics of chimeric ISF vectors before and after serial passaging in C6/36 mosquito cells. (A) Replication in C6/36 cells of: PCV/WNV_{KUN}-prME not exposed to serial passaging (P1); PCV/WNV_{KUN}-prME serially passaged 10 times (P10); and wild type PCV. (B) Replication in mosquito cells of PCV/ZIKV-prME not exposed to serial passaging (P1); PCV/ZIKV-prME serially passaged 10 times (P10); and wild type PCV.

[0168] FIG. 87 sets forth an assessment of the use of PCV/WNV_{KUN}-prME in ELISA to detect WNV-specific antibodies in human, horse, and crocodile sera.

[0169] FIG. 88 sets forth binding of PCV/ZIKV-prME particles by ZIKV positive and ZIKV naïve human serum.

[0170] FIG. 89 sets forth neutralisation of PCV/WNV_{KUN}-prME (labelled PCV-WNV_{STR}), BinJV/WNV_{KUN}-prME (labelled BinJV-WNV_{STR}), and wild type WNV replication using dilutions of virus positive and naïve (A) human; (B) horse; (C) crocodile; and (D) rabbit sera.

[0171] FIG. 90 sets forth neutralisation of PCV/ZIKV-prME (labelled PCV-ZIKV_{STR}) and wild type ZIKV replication by dilutions of ZIKV-positive human sera and ZIKV monoclonal antibodies.

[0172] FIG. 91 sets forth IFA staining of C6/36 mosquito cells infected with PaRV/KRBV-prM and wild type PaRV. Positive staining of anti-PaRV E mAb occurs to chimeric and wild type infected cells. In contrast, a mAb specific to PaRV-prM only detected wild type-PaRV and not the PaRV/KRBV-prM chimera.

[0173] FIG. 92 sets forth confirmation at P0 and P1 by RT-PCR of RNA extracted from PCV/KRBV-prME-infected cells. The RT-PCR was performed with KRBV E protein-specific primers (band at 800 bp). Extracted RNA from PCV and KRBV served as negative and positive controls, respectively, while a no template control (NTC) served as an additional negative control.

[0174] FIG. 93 sets forth an assessment of cross reactivity of BinJV and KUNV.

[0175] FIG. 94 sets forth SEQ ID NO:398 in FASTA format.

[0176] FIG. 95 sets forth SEQ ID NO:399 in FASTA format.

[0177] FIG. 96 sets forth SEQ ID NO:400 with nucleotide sequence numbering.

[0178] FIG. 97 sets forth SEQ ID NO:401 with nucleotide sequence numbering.

[0179] FIG. 98 sets forth SEQ ID NO:402 with amino acid sequence numbering.

[0180] FIG. 99 sets forth SEQ ID NO:403 with amino acid sequence numbering.

[0181] FIG. 100 sets forth SEQ ID NO:404 with amino acid sequence numbering.

[0182] FIG. 101 sets forth SEQ ID NO:405 with amino acid sequence numbering.

### BRIEF DESCRIPTION OF THE SEQUENCE LISTING

[0183] SEQ ID NO:1 Amino acid sequence of a PCV/WNV_{KUN}-prME chimeric ISF protein comprising C and NS1-NS5 proteins from PCV and prM and E proteins from West Nile virus Kunjin subtype (WNV_{KUNV}).

[0184] SEQ ID NO:2 Amino acid sequence of a PCV/ZIKA-prME chimeric ISF protein comprising C and NS1-NS5 proteins from PCV and prM and E proteins from ZIKA.

[0185] SEQ ID NO:3 Amino acid sequence of a PCV/DENV2-prME chimeric ISF protein comprising C and NS1-NS5 proteins from PCV and prM and E proteins from DENV2.

[0186] SEQ ID NO:4 Amino acid sequence of a BgV/WNV_{KUN}-prME chimeric ISF protein comprising C and NS1-NS5 proteins from BgV and prM and E proteins from WNV_{KUNV}.

[0187] SEQ ID NO:5 Amino acid sequence of a PCV polyprotein.

[0188] SEQ ID NO:6 Amino acid sequence of a BinJV polyprotein.

[0189] SEQ ID NO:7 Amino acid sequence of a BgV polyprotein.

[0190] SEQ ID NO:8 Amino acid sequence of a WNV_{KUN} polyprotein.

[0191] SEQ ID NO:9 Amino acid sequence of a ZIKA polyprotein.

[0192] SEQ ID NO:10 Amino acid sequence of a DENV2 polyprotein.

[0193] SEQ ID NO:11 Nucleotide sequence of a PCV/WNV_{KUN}-prME chimeric ISF vector.

[0194] SEQ ID NO:12 Nucleotide sequence of a PCV/ZIKA-prME chimeric ISF vector.

[0195] SEQ ID NO:13 Nucleotide sequence of a PCV/DENV2-prME chimeric ISF vector.

[0196] SEQ ID NO:14 Nucleotide sequence of a BgV/WNV_{KUNV}-prME chimeric ISF vector.

[0197] SEQ ID NO:15 Nucleotide sequence of an OpIE2 promoter.

[0198] SEQ ID NO:16 Nucleotide sequence of an OpIE2-CA promoter.

[0199] SEQ ID NO:17 Amino acid sequence of a KRBV polyprotein.

[0200] SEQ ID NO:18 Amino acid sequence of a Parramatta River virus polyprotein.

[0201] SEQ ID NO:19 Amino acid sequence of a CFAV polyprotein.

[0202] SEQ ID NO:20 Amino acid sequence of a WNV_{KUN}/PCV-prME chimeric ISF protein comprising C and NS1-NS5 proteins from WNV_{KUN} and prM and E proteins from PCV.

[0203] SEQ ID NO:21 Nucleotide sequence of a WNV_{KUN}/PCV-prME chimeric ISF vector.

[0204] SEQ ID NO:22 Amino acid sequence of a WNV_{KUN}/BgV-prME chimeric ISF protein comprising C and NS1-NS5 proteins from WNV_{KUN} and prM and E proteins from BgV.

[0205] SEQ ID NO:23 Nucleotide sequence of a WNV_{KUN}/BgV-prME chimeric ISF vector.

[0206] SEQ ID NO:24 Amino acid sequence of a WNV_{KUN}/BinJV-prME chimeric ISF protein comprising C and NS1-NS5 proteins from WNV_{KUN} and prM and E proteins from BinJV.

[0207] SEQ ID NO:25 Nucleotide sequence of a WNV_{KUN}/BinJV-prME chimeric ISF vector.

[0208] SEQ ID NO:26 Amino acid sequence of WNV_{KUN}/CFAV-prME chimeric ISF protein comprising C and NS1-NS5 proteins from WNV_{KUN} and prM and E proteins from BinJV.

[0209] SEQ ID NO:27 Nucleotide sequence of WNV_{KUN}/CFAV-prME chimeric ISF vector.

[0210] SEQ ID NO:28 Amino acid sequence of WNV_{KUN}/KRBV-prME chimeric ISF protein comprising C and NS1-NS5 proteins from WNV_{KUN} and prM and E proteins from KRBV.

[0211] SEQ ID NO:29 Nucleotide sequence of WNV_{KUN}/KRBV-prME chimeric ISF vector.

[0212] SEQ ID NO:30 Amino acid sequence of WNV_{KUN}/PaRV-prME chimeric ISF protein comprising C and NS1-NS5 proteins from WNV_{KUN} and prM and E proteins from PaRV.

[0213] SEQ ID NO:31 Nucleotide sequence of WNV_{KUN}/PaRV-prME chimeric ISF vector.

[0214] SEQ ID NO:32 Amino acid sequence of BinJV/WNV_{KUNV}-EDIII chimeric ISF protein.

[0215] SEQ ID NO:33 Nucleotide sequence of BinJV/WNV_{KUNV}-EDIII chimeric ISF protein.

[0216] SEQ ID NO:34 Nucleotide sequence of CPEC vector encoding BgV polyprotein driven by OpIE2-CA.

[0217] SEQ ID NO:35 Nucleotide sequence of CPEC vector encoding BinJV polyprotein driven by OpIE2-CA.

[0218] SEQ ID NO:36 Nucleotide sequence of CPEC vector encoding PCV polyprotein driven by OpIE2-CA.

[0219] SEQ ID NO:37 Nucleotide sequence of CPEC vector encoding PaRV polyprotein driven by OpIE2-CA.

[0220] SEQ ID NO:38 Nucleotide sequence of CPEC vector encoding WNV_{KUNV} polyprotein driven by OpIE2-CA.

[0221] SEQ ID NO:39 PCV genomic nucleotide sequence.

[0222] SEQ ID NO:40 BinJV genomic nucleotide sequence.

[0223] SEQ ID NO:41 BgV genomic nucleotide sequence.

[0224] SEQ ID NO:42 KRBV genomic nucleotide sequence.

[0225] SEQ ID NO:43 PaRV genomic nucleotide sequence.

[0226] SEQ ID NO:44 CFAV genomic nucleotide sequence.

[0227] SEQ ID NO:45 WNV_{KUN} genomic nucleotide sequence

[0228] SEQ ID NO:46 ZIKA genomic nucleotide sequence.

[0229] SEQ ID NO:47 DENV2 genomic nucleotide sequence.

[0230] SEQ ID NOS:48-79 CPEC primers for producing BgV/WNV_{KUN}-prME vector.

[0231] SEQ ID NOS:80-96 CPEC primers for producing BinJV/WNV_{KUN}-EDIII vector.

[0232] SEQ ID NOS:97-138 CPEC primers for producing WNV_{KUN}/BgV-prME vector.

[0233] SEQ ID NOS:139-173 CPEC primers for producing WNV_{KUN}/BinJV-prME vector.

[0234] SEQ ID NOS:174-208 CPEC primers for producing WNV_{KUN}/CFAV-prME vector.

[0235] SEQ ID NOS:209-241 CPEC primers for producing WNV_{KUN}/KRBV-prME vector.

[0236] SEQ ID NOS:242-282 CPEC primers for producing WNV_{KUN}/PaRV-prME vector.

[0237] SEQ ID NOS:283-317 CPEC primers for producing WNV_{KUN}/PCV-prME vector.

[0238] SEQ ID NOS:318-338 CPEC primers for producing PCV/DENV2-prME vector.

[0239] SEQ ID NOS:339-360 CPEC primers for producing PCV/WNV_{KUN}-prME vector.

[0240] SEQ ID NOS:361-381 CPEC primers for producing PCV/ZIKV-prME vector.

[0241] SEQ ID NO:382 P10 promoter sequence of AcMNP.

[0242] SEQ ID NO:383 Polyhedrin promoter sequence of AcMNP.

[0243] SEQ ID NO:384 Amino acid sequence of PaRV/WNV_{KUN}-prME chimeric ISF protein comprising C and NS1-NS5 proteins from PaRV and prM and E proteins from WNV_{KUN}.

[0244] SEQ ID NO:385 Nucleotide sequence of PaRV/WNV_{KUN}-prME chimeric ISF vector.

[0245] SEQ ID NO:386 Genomic nucleotide sequence of Lilly Creek virus (LiCV).

[0246] SEQ ID NO:387 Amino acid sequence of ORF of Lilly Creek virus.

[0247] SEQ ID NO:388 Nucleotide sequence of BinJV-WNV_{KUNV}-prME chimeric ISF vector.

[0248] SEQ ID NO:389 Amino acid sequence of BinJV/WNV_{KUNV}-prME ORF.

[0249] SEQ ID NO:390 Nucleotide sequence of BinJV/ZIKV-prME chimeric ISF vector.

[0250] SEQ ID NO:391 Amino acid sequence of BinJV/ZIKV-prME ORF.

[0251] SEQ ID NO:392 Nucleotide sequence of BinJV/WNVED1 chimeric ISF vector.

[0252] SEQ ID NO:393 Amino acid sequence of BinJV/WNVED1 ORF.

[0253] SEQ ID NO:394 Nucleotide sequence of BinJV/DENV1-prME chimeric ISF vector.

[0254] SEQ ID NO:395 Amino acid sequence of BinJV/DENV1-prME ORF.

[0255] SEQ ID NO:396 Nucleotide sequence of BinJV_{V106G} vector.

[0256] SEQ ID NO:397 Amino acid sequence of BinJV_{V106G} ORF.

[0257] SEQ ID NO:398 Nucleotide sequence of PaRV/KRBV-prM chimeric ISF vector.

[0258] SEQ ID NO:399 Nucleotide sequence of PCV/KRBV-prME chimeric ISF vector.

[0259] SEQ ID NO:400 Nucleotide sequence of PCV/ZIKV-prME P1 chimeric ISF vector.

[0260] SEQ ID NO:401 Nucleotide sequence of PCV/ZIKV-prME P10 chimeric ISF vector.

[0261] SEQ ID NO:402 Amino acid sequence of PaRV/KRBV-prM ORF.

[0262] SEQ ID NO:403 Amino acid sequence of PCV/ZIKV-prME P1 ORF.

[0263] SEQ ID NO:404 Amino acid sequence of PCV/ZIKV-prME P10 ORF.

[0264] SEQ ID NO:405 Amino acid sequence of PaRV/KRBV-prME ORF.

### DETAILED DESCRIPTION

[0265] The present invention is partly predicated on the realization that chimeric insect-specific flaviviruses, and proteins and/or particles thereof, offer potential for new vaccines. The invention is also partly predicated on the realization that chimeric insect-specific flaviviruses, and proteins and/or particles thereof, offer potential for new diagnostics.

[0266] In particular, the inventors have realised that chimeric insect-specific flaviviruses (and corresponding proteins and/or particles) containing immunogenic sequence can potentially be used directly for vaccination of vertebrate subjects (e.g. humans; avians; reptiles), as these insect-specific flaviviruses are not expected to substantially replicate in or infect non-insect cells. The inventors have further realised that chimeric insect-specific flaviviruses (and corresponding proteins and/or particles) may be useful in assays for the detection of antibodies, and may have advantages (for example in relation to safety; efficacy; and/or specificity) in this context.

[0267] The invention is also partly predicated on the discovery of design elements important for the construction of vectors to allow for the production of chimeric insect-specific flaviviruses, and proteins and/or particles thereof, from insect cells.

### Isolated Proteins

[0268] Accordingly, one aspect of the invention provides an isolated protein comprising:

[0269] (i) an amino acid sequence of a protein encoded by the genome of an insect-specific flavivirus; and

[0270] (ii) an immunogenic amino acid sequence not encoded by the genome of an insect-specific flavivirus.

[0271] For the purposes of this invention, by “isolated” is meant material (e.g. proteins, nucleic acids, cells etc.) that has been removed from its natural state or otherwise been subjected to human manipulation. Isolated material may be substantially or essentially free from components that normally accompany it in its natural state, or may be manipulated so as to be in an artificial state together with components that normally accompany it in its natural state. Isolated material may be in native, chemical synthetic or recombinant form.

[0272] As used herein, “flavirus”, “flaviruses”, “flaviviral” etc. refers to members of the genus Flavivirus within the family Flaviviridae. As will be readily understood by the skilled person flaviviruses are enveloped viruses, with icosahedral or spherical geometries, and a typical diameter of around 50 nm. Flaviviruses comprise structural and non-structural proteins. Specifically, flavivirus proteins typically comprise three structural proteins (Capsid, prM, and Envelope) and seven non-structural proteins (NS1, NS2A, NS2B, NS3, NS4A, NS4B, NS5).

[0273] It will be understood that the term protein “protein” is used herein to mean an amino acid polymer, comprising natural and/or non-natural amino acids, including L- and D-isomeric forms as are well understood in the art. Additionally, for the purposes of this invention, it will be understood that the term “protein” includes and encompasses both individual protein subunits, and complexes of individual protein subunits. As will be readily appreciated by the skilled person, flavivirus proteins typically originate as a single ‘polyprotein’, which is subsequently processed into the individual structural and non-structural proteins of the flavivirus during replication. It will be understood that an isolated protein of this aspect includes such polyproteins, as well as complexes of any or all individual structural and/or non-structural flavivirus protein subunits, as described above.

[0274] It will be further appreciated that, in addition to structural and non-structural proteins, flaviviruses comprise a nucleic acid genome encoding these proteins. Specifically, flavivirus genomes are linear positive-sense RNA and non-segmented, and generally about 10-11 kb in length. The genomic RNA is typically modified at the 5′ end with a cap-1 structure.

[0275] In the context of this invention, an “insect-specific flavivirus” (or “ISF”) will be understood to be a flavivirus which infects a suitable insect host and/or grows and replicates in suitable insect cell lines, but which does not grow or replicate, or at least demonstrates substantially restricted growth or replication, in at least wild type vertebrate cell lines. For an overview of ISFs, the skilled person is directed to Calzolari et al. (2016) Infections, Genetics and Evolution, 40: 381-388, and Blitvich and Firth (2015) Viruses, 7: 1927-1959; incorporated herein by reference.

[0276] For the purposes of this invention, ISFs will be understood to include known wild type ISFs, such as those described in Calzolari et al.; and Blitvich and Firth, supra, as well as flavivirus mutants, variants, recombinants, and derivatives etc. which similarly infect a suitable insect host and/or grow and replicate in suitable insect cell lines, but which do not grow or replicate, or at least demonstrate substantially restricted growth or replication, in at least wild type vertebrate cell lines. With reference to Colmant et al. (2016) Journal of General Virology, 97: 1087-1093, it will be appreciated that Bamaga virus (BgV) infects a mosquito host, and also demonstrates some restricted replication in certain wild type vertebrate cell lines. For the purposes of this invention, BgV, and similar viruses which infect an insect or mosquito host but also demonstrate some restricted replication in wild type vertebrate cell lines, will be considered an “ISF-like” virus.

[0277] Typically, for the purpose of this invention, an ISF-like virus will be considered to fall within the scope of an insect-specific flavivirus. However, in certain embodiments, the insect-specific flavivirus excludes ISF-like viruses, such as BgV.

[0278] The terms “immunogenic amino acid sequence”, “immunogenic sequence”, “immunogenic protein, etc. are used interchangeably herein with immunogen, antigen, epitope, antigenic sequence, polytope, immunogenic peptide, peptide, antigenic epitope etc. as is known in the art to denote or refer to a sequence capable of eliciting an immune response, and more particularly a specific or desired immune response such as protective immune response or memory immune response. The term immunogen broadly includes any type of molecule which is recognized by a host immune system as being foreign Immunogenic sequences of the invention may comprise B and/or T-cell epitopes.

[0279] In certain particularly preferred embodiments, the isolated protein of this aspect is or comprises an amino acid sequence set forth in SEQ ID NOS:1-4 or SEQ ID NOS:32, 389, 391, or 395, or a fragment, variant, or derivative thereof. In certain embodiments, the isolated protein of this aspect is or comprises an amino acid sequence set forth in SEQ ID NOS:20, 22, 24, 26, 28, 30, 384, 393, 397, or 402-405, or a fragment or variant thereof.

[0280] In certain embodiments, a “fragment” protein of this aspect comprises an amino acid sequence which constitutes less than 100%, but at least 20%, preferably at least 30%, more preferably at least 80% or even more preferably at least 90%, 95%, 96%, 97%, 98% or 99% of an amino acid sequence set forth in SEQ ID NOS:1-4 or SEQ ID NOS:32, 389, 391, or 395; or SEQ ID NOS:20, 22, 24, 26, 28, 30, 384, 393, 397, or 402-405. In one preferred embodiment the protein fragment comprises no more than 100, 200, 300, 400, 500, 600, 700, 800, 900, 1000, 1100, 1200, 1300, 1400, 1500, 1600, 1700, 1800, 1900, 2000, 2100, 2200, 2300, 2400, 2500, 2600, 2700, 2800, 2900, 3000, 3100, 3200, 3300, or 3400 contiguous amino acid sequences of an amino acid sequence set forth in SEQ ID NOS:1-4 or SEQ ID NOS:32, 389, 391, or 395; or SEQ ID NOS:20, 22, 24, 26, 28, 30, 384, or 397.

[0281] As used herein a “variant” protein or nucleic acid, respectively, will be understood to be one in which one or more amino acids or nucleotides, respectively have been deleted or substituted by different amino acids or nucleotides, respectively. Variants include naturally occurring (e.g., allelic) variants, orthologs (e.g. from other species) and synthetic variants, such as produced in vitro using mutagenesis techniques.

[0282] In some embodiments of this aspect, the isolated protein fragment includes an amino acid sequences having at least 75%, 80%, 85%, 90% or 95%, 96%, 97%, 98% or 99% amino acid sequence identity with a nucleotide sequence set forth in SEQ ID NOS:1-4, 32, 389, 391, or 395; or SEQ ID NOS:20, 22, 24, 26, 28, 30, 384, or 397.

[0283] Terms used generally herein to describe sequence relationships between respective amino acid and nucleotide sequences and sequences include “comparison window”, “sequence identity”, “percentage of sequence identity” and “substantial identity”. Because respective nucleic acids/proteins may each comprise (1) only one or more portions of a complete nucleic acid/protein sequence that are shared by the nucleic acids/proteins, and (2) one or more portions which are divergent between the nucleic acids/proteins, sequence comparisons are typically performed by comparing sequences over a “comparison window” to identify and compare local regions of sequence similarity. A “comparison window” refers to a conceptual segment of typically 6, 9 or 12 contiguous residues that is compared to a reference sequence.

[0284] The comparison window may comprise additions or deletions (i.e., gaps) of about 20% or less as compared to the reference sequence for optimal alignment of the respective sequences. Optimal alignment of sequences for aligning a comparison window may be conducted by computerised implementations of algorithms (Geneworks program by Intelligenetics; GAP, BESTFIT, FASTA, and TFASTA in the Wisconsin Genetics Software Package Release 7.0, Genetics Computer Group, 575 Science Drive Madison, Wis., USA, incorporated herein by reference) or by inspection and the best alignment (i.e., resulting in the highest percentage homology over the comparison window) generated by any of the various methods selected. Reference also may be made to the BLAST family of programs as for example disclosed by Altschul et al., 1997, Nucl. Acids Res. 25 3389, which is incorporated herein by reference. A detailed discussion of sequence analysis can be found in Unit 19.3 of CURRENT PROTOCOLS IN MOLECULAR BIOLOGY Eds. Ausubel et al. (John Wiley & Sons Inc NY, 1995-1999).

[0285] The term “sequence identity” is used herein in its broadest sense to include the number of exact nucleotide or amino acid matches having regard to an appropriate alignment using a standard algorithm, having regard to the extent that sequences are identical over a window of comparison. Thus, a “percentage of sequence identity” is calculated by comparing two optimally aligned sequences over the window of comparison, determining the number of positions at which the identical nucleic acid base (e.g., A, T, C, G, U) or amino acid occurs in both sequences to yield the number of matched positions, dividing the number of matched positions by the total number of positions in the window of comparison (i.e., the window size), and multiplying the result by 100 to yield the percentage of sequence identity. For example, “sequence identity” may be understood to mean the “match percentage” calculated by the DNASIS computer program (Version 2.5 for Windows; available from Hitachi Software engineering Co., Ltd., South San Francisco, Calif., USA).

[0286] A detailed discussion of sequence analysis can be found in Chapter 19.3 of Ausubel et al., supra.

[0287] It will be appreciated that, without limitation, protein and nucleic acid variants can be created by mutagenizing a protein or an encoding nucleic acid, such as by random mutagenesis or site-directed mutagenesis. Examples of nucleic acid mutagenesis methods are provided in Chapter 9 of CURRENT PROTOCOLS IN MOLECULAR BIOLOGY, Ausubel et al., supra which is incorporated herein by reference. Mutagenesis may also be induced by chemical means, such as ethyl methane sulphonate (EMS) and/or irradiation means, such as fast neutron irradiation of seeds as known in the art (Carroll et al., 1985, Proc. Natl. Acad. Sci. USA 82 4162; Carroll et al, 1985, Plant Physiol. 78 34; Men et al., 2002, Genome Letters 3 147).

[0288] Also included according to this aspect are derivative amino acid sequences and/or proteins.

[0289] As used herein, “derivative” proteins are proteins that have been altered, for example by conjugation or complexing with other chemical moieties or by post-translational modification techniques as would be understood in the art. Such derivatives include amino acid deletions and/or additions to polypeptides of the invention, or variants thereof.

[0290] “Additions” of amino acids may include fusion of the peptide or polypeptides of the invention, or variants thereof, with other peptides or polypeptides. Particular examples of such peptides include amino (N) and carboxyl (C) terminal amino acids added for use as fusion partners or tags.

[0291] Well-known examples of fusion partners include hexahistidine (6X-HIS)-tag, N-Flag, Fc portion of human IgG, glutathione-S-transferase (GST) and maltose binding protein (MBP), which are particularly useful for isolation of the fusion polypeptide by affinity chromatography. For the purposes of fusion polypeptide purification by affinity chromatography, relevant matrices for affinity chromatography may include nickel-conjugated or cobalt-conjugated resins, fusion polypeptide specific antibodies, glutathione-conjugated resins, and amylose-conjugated resins respectively. Some matrices are available in “kit” form, such as the ProBond™ Purification System (Invitrogene Corp.) which incorporates a 6X-His fusion vector and purification using ProBond™ resin.

[0292] The fusion partners may also have protease cleavage sites, for example enterokinase (available from Invitrogen Corp. as EnterokinaseMax™), Factor Xₐ or Thrombin, which allow the relevant protease to digest the fusion polypeptide of the invention and thereby liberate the recombinant polypeptide of the invention therefrom. The liberated polypeptide can then be isolated from the fusion partner by subsequent chromatographic separation.

[0293] Fusion partners may also include within their scope “epitope tags”, which are usually short peptide sequences for which a specific antibody is available.

[0294] Other derivatives contemplated by the invention include, chemical modification to side chains, incorporation of unnatural amino acids and/or their derivatives during peptide or polypeptide synthesis and the use of cross linkers and other methods which impose conformational constraints on the polypeptides, fragments and variants of the invention.

[0295] Non-limiting examples of side chain modifications contemplated by the present invention include chemical modifications of amino groups, carboxyl groups, guanidine groups of arginine residues, sulphydryl groups, tryptophan residues, tyrosine residues and/or the imidazole ring of histidine residues, as are well understood in the art.

[0296] Non-limiting examples of incorporating unnatural amino acids and derivatives during peptide synthesis include, use of 4-amino butyric acid, 6-aminohexanoic acid, 4-amino-3-hydroxy-5-phenylpentanoic acid, 4-amino-3-hydroxy-6-methylheptanoic acid, t-butylglycine, norleucine, norvaline, phenylglycine, ornithine, sarcosine, 2-thienyl alanine and/or D-isomers of amino acids.

[0297] In some preferred embodiments, the isolated protein of this aspect will be of an isolated chimeric insect-specific flavivirus, as hereinbelow described.

[0298] Suitably, the isolated protein is, or is of, a virus particle. As used herein, a “virus particle” will be understood to encompass infectious complete virus particles, and subviral particles, as are well known in the art. In particular regard to subviral particles, as will be readily understood by the skilled person, these particles contain viral proteins but typically do not contain viral genetic material. As such, subviral particles are typically incapable of self-replication. Subviral particles will generally contain structural flavivirus proteins and may contain non-structural flavivirus proteins. One particular, non-limiting example of a subviral particle is a VLP.

[0299] As is known in the art, subviral particles (inclusive of VLPs) may be produced by expression, e.g. in vitro expression, of viral proteins followed by assembly of these proteins. For an overview of subviral particle (e.g. VLP) production, the skilled person is directed to Machida and Imataka (2015) Biotechnology Letters 37(4): 753-760, incorporated herein by reference. Isolated subviral particles may also potentially be produced by purification of a corresponding isolated chimeric insect-specific flavivirus, such as hereinbelow described, to remove genetic material from the flavivirus.

### Amino Acid Sequence of Proteins Encoded by the Genome of an Insect-Specific Flavivirus

[0300] As set forth above, the amino acid sequence (i) of the isolated protein of this aspect will be of, or derived from, a protein encoded by the genome of an insect-specific flavivirus (ISF).

[0301] With reference to Colmant et al. (2017) mSphere 2(4) pii: e00262-17, it will be appreciated that insect-specific flaviviruses may be classified as ‘Lineage I’ or ‘Lineage II’ ISFs. In certain embodiments, the amino acid sequence (i) is of, or derived from, a protein encoded by the genome of a Lineage I ISF. In certain embodiments, the amino acid sequence (i) is of, or derived from, a protein encoded by the genome of a Lineage II ISF.

[0302] Preferably, the insect-specific flavivirus encoding said amino acid sequence is capable of infecting a plurality of different insect cells. In preferred embodiments, said insect-specific flavivirus is capable of infecting a plurality of species of insect cells. In particularly preferred embodiments, said first insect-specific flavivirus is capable of infecting a plurality of genera of insect cells.

[0303] With reference to the examples and FIG. 11, it will be appreciated that the use of an insect-specific flavivirus capable of infecting a plurality of genera of insect cells has been observed to be particularly effective for the production of chimeric insect-specific flaviviruses of the invention, which comprise isolated proteins according to certain preferred embodiments of this aspect. Without being bound by theory, the inventors hypothesize that the use of an amino acid sequence (i) of or derived from a protein encoded by the genome of an insect-specific flavivirus wherein the flavivirus can infect a plurality of genera and/or species of insect cells may be generally desirable for producing isolated insect-specific flaviviruses. Therefore, proteins comprising such sequence are particularly desirable according to this aspect.

[0304] Furthermore, without being bound by theory, it is hypothesized that certain properties of the E protein of an insect-specific flavivirus may make the insect-specific flavivirus particularly desirable in this context. In particular, it is hypothesized that use of an amino acid sequence (i) of or derived from a protein encoded by the genome of an insect-specific flavivirus wherein the E protein has similar characteristics as an E protein of a flavivirus that is not insect-specific may be particularly desirable for the production of chimeric insect-specific flaviviruses of the invention.

[0305] By way of non-limiting example, said E protein of the insect-specific flavivirus may have the same or similar disulphide bond folding pattern; the same or similar CD loop structure of the EDIII domain; or the same or similar structure of the EDI domain, or EDII domain, as a flavivirus that is not insect-specific, preferably wherein the immunogenic sequence (ii) of the protein of this aspect is of or derived from said flavivirus that is not insect specific.

[0306] In certain preferred embodiments, the amino acid sequence (i) is encoded by the genome of a flavivirus that has a mosquito as a native host. Preferably, said mosquito is selected from the group consisting of Coquillettidia spp.; Aedes spp.; and Culex spp.

[0307] Preferably, the insect-specific flavivirus of (i) is selected from the group consisting of Palm Creek virus (PCV); Binjari virus (BinJV); Lilly Creek virus (LiCV) and Bamaga virus (BgV). With reference to the Figures and Examples, it will be appreciated that said viruses can infect a plurality of genera and/or species of insect cells. In particular regard to BinJV, it will be appreciated that the E protein of this insect-specific flavivirus has similar characteristics as certain flaviviruses that are not insect-specific (such as Zika virus, West Nile virus, and Dengue virus) amino acid sequence of or derived from which viruses are preferred for use as immunogenic sequences (ii) of the protein of this aspect, as hereinbelow described. Specifically, the E protein of BinJV has substantially the same: disulphide bond folding pattern; structure within the CD loop of EDIII; and EDI structure surrounding the N-linked glycosylation site (notwithstanding the presence of a small deletion), as the E proteins of Zika virus, West Nile virus, and Dengue virus.

[0308] In embodiments, the insect-specific flavivirus of (i) may be selected from the group consisting of Parramatta River virus (PaRV), Cell fusing agent virus (CFAV), and Karumba virus (KRBV). With reference to the Figures and Examples, it will be appreciated that infecting by said viruses is restricted to individual mosquito species or genera.

[0309] In particularly preferred embodiments, (i) comprises an amino acid sequence set forth in SEQ ID NOS:5-7, or 387, or a fragment, variant, or derivative thereof. In embodiments, (i) may comprise an amino acid sequence set forth in SEQ ID NOS:17-19.

[0310] It will be understood that, in certain embodiments, the amino acid sequence (i) of the isolated protein of this aspect may be of, or derived from, a plurality of insect-specific flaviviruses. By way of non-limiting example, the amino acid sequence (i) may be of a plurality of flavivirus subunit proteins, each of which is of or derived from an individual insect-specific flavivirus. Additionally or alternatively, individual subunit protein(s) may be encoded by at least a portion of the amino acid sequence (i) that is of or derived from a plurality of insect-specific flaviviruses.

### Immunogenic Sequences

[0311] As set forth above, the immunogenic sequence (ii) of the protein of this aspect will not be encoded by the genome of an insect-specific flavivirus.

[0312] Immunogenic amino acid sequences of this aspect may be any sequence capable of eliciting an immune response upon administration to an animal. In embodiments, the immune response may be either mucosal, B-lymphocyte or T-lymphocyte mediated, or a combination thereof. Without limitation, the T-lymphocyte mediated response may be a specific cytotoxic T-lymphocyte response. In certain preferred embodiments, the immunogenic sequences may induce a neutralising antibody response. Preferably, the immune response is a protective immune response.

[0313] It will be appreciated that the isolated insect-specific flavivirus may include a plurality of immunogenic amino acid sequences (ii). The plurality of isolated immunogenic amino acid sequences may be a plurality of the same immunogenic amino acid sequences, or a plurality of different immunogenic amino acid sequences.

[0314] It will also be understood that “spacer” amino acids may be included between one or the plurality of the immunogenic sequences or fragments thereof present in said isolated protein. Such spacer amino acid sequences need not be immunogenic themselves, but may serve to separate one or a plurality of immunogenic sequences from other components of the amino acid sequence of the isolated insect-specific flavivirus according to this aspect.

[0315] In preferred embodiments, the immunogenic amino acid sequence (ii) of the protein of this aspect comprises an amino acid sequence of, or derived from, a protein encoded by the genome of a flavivirus that is not insect-specific.

[0316] In preferred embodiments, the immunogenic amino acid sequence (ii) is of at least part of a structural protein of a flavivirus that is not insect-specific. Suitably, the structural protein is selected from the group consisting of a Capsid; prM; and Envelope protein. Preferably, the structural protein is a prM protein and/or an Envelope protein.

[0317] Additionally or alternatively, the immunogenic amino acid sequence may be of at least part of a non-structural protein of the flavivirus. Suitably, the non-structural protein is selected from the group consisting of an NS1; NS2A; NS2B; NS3; NS4A; NS4B; and NS5 protein. In one particularly preferred alternative embodiment, the non-structural protein is NS1.

[0318] In embodiments wherein the immunogenic amino acid sequence (ii) is of protein encoded by the genome of a flavivirus that is not insect-specific, preferably said flavivirus is a vertebrate-infecting flavivirus. More preferably, said flavivirus is a mammal, reptile or avian-infecting flavivirus. In one particularly preferred embodiment, said flavivirus is a human-infecting flavivirus. In one particularly preferred embodiment, said flavivirus is a crocodile-infecting flavivirus.

[0319] Preferably, the immunogenic amino acid sequence (ii) is of a protein encoded by the genome of a flavivirus selected from the group consisting of Zika virus (ZIKV); West Nile virus (WNV); Dengue virus (DENY); Japanese encephalitis virus (JEV); Yellow fever virus (YFV); tick-borne encephalitis virus (TBEV), St Louis encephalitis virus (SLEV), Murray valley encephalitis virus (MVEV); Duck tembusu virus; Turkey Meningoencephalitis Virus (TMEV); Usutu virus; Sepik virus; Wesselsbron virus; Baiyangdian Virus (BYD); Sitiawan Virus (SV). Preferably, said flavivirus is selected from the group consisting of Zika virus, West Nile virus; and Dengue virus.

[0320] In a preferred embodiment wherein the virus is West Nile virus, the virus is the Kunjin (KUNV) subtype of West Nile virus. In a preferred embodiment wherein the virus is Dengue virus, the virus is Dengue Virus Type 1, 2, 3 or 4.

[0321] In particularly preferred embodiments, the immunogenic sequence (ii) of the isolated protein of this aspect is or comprises an amino acid sequence set forth in SEQ ID NOS:8-10, or a fragment, variant, or derivative thereof.

[0322] In embodiments wherein the immunogenic sequence (ii) is of a protein encoded by the genome of a flavivirus that is not insect-specific, it is particularly preferred that, within the isolated protein of this aspect, the immunogenic sequence (ii) replaces a corresponding amino acid sequence of the insect-specific flavivirus which genome encodes the amino acid sequence (i).

[0323] By way of non-limiting example, in the particularly preferred embodiment of the isolated protein of this aspect set forth in SEQ ID NO:1, as set forth in the examples, the immunogenic sequence (ii) (the prM and Envelope amino acid sequence) encoded by the genome of a human-infecting flavivirus (West Nile virus), has replaced the corresponding prM and Envelope amino acid sequence encoded by the genome of an insect-specific flavivirus (Palm Creek virus).

[0324] Without being bound by theory, the inventors hypothesize that the use of an immunogenic sequence (ii) encoded by the genome of a flavivirus that is not insect-specific which replaces a corresponding amino acid sequence within a structural or non-structural protein encoded by the genome of an insect-specific flavivirus in the isolated protein of this aspect may be particularly advantageous for the invention. By way of non-limiting example, it is hypothesized that, at least in some circumstances, this may allow for improved replication of an isolated chimeric insect-specific flavivirus comprising said protein in insect cells and/or the inducement of a desirable immune response in a subject, when the isolated protein, or an isolated chimeric insect-specific flavivirus, or a related virus particle, comprising the protein, is used as or as part of a vaccine. This arrangement is also expected to facilitate the native folding of the immunogenic sequence (ii), e.g. in embodiments wherein said immunogenic sequence is of an E protein and/or prM protein.

[0325] In some preferred embodiments, the immunogenic sequence (ii) may be of the EDIII domain of an E protein of the isolated protein of this aspect. Suitably, in these embodiments, the isolated protein comprises an E protein that is chimeric. Preferably, the EDIII domain of the chimeric E protein is an immunogenic sequence (ii) that is of or derived from a vertebrate-infecting flavivirus, and the remainder of the E protein (including the EDI and EDII domains) is of the amino acid sequence (i) encoded by the genome of an insect-specific flavivirus. Alternatively, the EDI and/or the EDII domain of the chimeric E protein may be an immunogenic sequence (ii) that is of or derived from a vertebrate infecting flavivirus, and the remainder of the E protein may be of the amino acid sequence (i) encoded by the genome of an insect-specific flavivirus.

[0326] In some preferred embodiments, the immunogenic sequence (ii) may be of a prM protein of the isolated protein of this aspect.

[0327] With reference to the Examples, it will be appreciated that isolated proteins of this aspect wherein the immunogenic sequence (ii) is of the EDIII domain of the E protein and/or the prM protein of the isolated protein, may have particularly desirable properties in regard to specificity of the immunogenic sequence. As such, these embodiments of the isolated protein of this aspect may be particularly desirable in the context of diagnostic applications, as hereinbelow described.

[0328] Furthermore, it will be appreciated that use of an immunogenic sequence (ii) that is of the EDIII domain and/or the prM protein of the isolated protein of this aspect may facilitate improved or enhanced expression of the immunogenic EDIII domain and/or prM protein, as compared to certain existing recombinant protein expression strategies. As will be understood by the skilled person, recombinant flavivirus prM protein in particular is difficult to express in large quantities using traditional recombinant expression strategies, as it is a membrane anchored protein.

[0329] It will nevertheless be understood that the immunogenic sequence (ii) of the isolated protein of this aspect need not necessarily replace a corresponding amino acid sequence of the insect-specific flavivirus which genome encodes the amino acid sequence (i). For example, the immunogenic sequence (ii) may be an addition or insertion to the amino acid sequence (i). By way of elaboration, the immunogenic sequence may be attached to the amino or carboxy terminal of a structural or non-structural protein comprising the amino acid sequence (i), or be inserted within a structural or non-structural protein comprising the amino acid sequence (i).

[0330] It will be further appreciated that, although the use of an immunogenic sequence (ii) that is of, or derived from, a protein encoded by the genome of a flavivirus that is not insect-specific is particularly preferred, the use of any other suitable immunogenic amino acid sequences (ii) also falls within the scope of this aspect.

[0331] Generally, suitable other sequences for use as the immunogenic amino acid sequence (ii) of the isolated protein of this aspect may include amino acid sequence derived from, of, or corresponding to an immunogen from a pathogenic organism such as a virus, a bacteria, a fungi and a parasite; a cancer immunogen; an allergic reaction immunogen (i.e., an allergen); a transplantation immunogen; or an autoantigen, although without limitation thereto.

[0332] Preferably, such other suitable immunogenic amino acid sequences are of a pathogenic organism that causes or is related to or associated with an infectious disease, disorder, or condition of an animal Preferably the animal is a vertebrate, preferably an avian; reptile; or mammal, preferably a human. Said pathogenic organisms include, but are not limited to viral; bacterial; fungal; mycobacterial; and parasitic organisms.

[0333] Particularly preferred other suitable immunogenic amino acid sequences are amino acid sequences from a virus. Further to the preferred embodiments wherein the immunogenic amino acid sequence (ii) is of a flavivirus that is not insect-specific, the invention encompasses immunogenic amino acid sequences (ii) of any member of the positive (+) sense RNA Virus group including (and without limitation thereto) any member of the family Astroviridae inclusive of an astrovirus (e.g., a human astrovirus) and an arterivirus (e.g., an equine arteritis virus); any member of the family Caliciviridae inclusive of a Norwalk virus, a Hepatitis E virus; any member of the family Coronaviridae inclusive of Corona Virus and SARS and a torovirus; any member of the family Picornaviridae inclusive of an enterovirus, a rhinovirus (e.g. a human rhinovirus 1A), a hepatovirus (e.g. a hepatitis A virus), a cardiovirus (e.g. a encephalomyocarditis virus) and an aphtovirus (e.g. foot-and-mouth disease virus); any member of the family Togaviridae inclusive of an alphavirus (e.g., a Sindbis virus) and a rubivirus (e.g. a rubella virus).

[0334] The invention also encompasses immunogenic amino acid sequences (ii) of any member of the negative (−) sense RNA virus group including (and without limitation thereto) any member of the family Filoviridae inclusive of a filovirus (e.g. Marburg virus, Ebola virus); any member of the family Paramyxoviridae inclusive of a paramyxovirus (e.g. a human parainfluenza virus 1), a morbillivirus (e.g. a measles virus), a rubulavirus (a mumps virus), a Hendra virus and a Nipah virus; any member of the family Pneumovirinae inclusive of a pneumovirus (eg. a human respiratory syncytial virus); any member of the family Rhabdoviridae inclusive of a vesiculovirus (e.g. a vesicular stomatitis virus, Indiana virus), a lyssavirus (e.g. a rabies virus) and an ephemerovirus (e.g. a bovine ephemeral fever virus); any member of the ambisense RNA virus group inclusive of any member of the family Arenaviridae such as an arenavirus (e.g. lymphocytic choriomeningitis virus); any member of the family Bunyaviridae inclusive of a bunyavirus (e.g. Bunyamwera virus) and a hantavirus (e.g. a Hantaan virus); any member of the family Orthomyxoviridae inclusive of an influenzavirus A (such as an influenza A virus, an avian influenza A virus), an influenzavirus B (such as an influenza B virus), an influenzavirus C (such as an influenza C virus) and a “Thogoto-like viruses” (e.g. Thogoto virus).

[0335] The invention also encompasses immunogenic amino acid sequences (ii) of any member of the dsRNA Viruses group including (and without limitation thereto) any member of the family Birnaviridae inclusive of an aquabirnavirus (e.g., an infectious pancreatic necrosis virus) and an avibirnavirus (e.g., infectious bursal disease virus); any member of the family Reoviridae inclusive of an orthoreovirus (e.g., a reovirus 3), a orbivirus (e.g., a bluetongue virus 1), a rotavirus, a coltivirus (e.g., a Colorado tick fever virus and an aquareovirus.

[0336] The invention also encompasses immunogenic amino acid sequences (ii) of any member of the RNA Reverse Transcribing Viruses group including any member of the family Retroviridae inclusive of a mammalian type B retrovirus (e.g. a mouse mammary tumor virus), a mammalian type C retrovirus (e.g. a murine leukemia virus), an avian type C retrovirus (e.g. a avian leukosis virus), a type D retrovirus (eg a Mason-Pfizer monkey virus), a BLV-HTLV retrovirus (e.g. a bovine leukemia virus), a lentivirus (e.g. a human immunodeficiency virus 1) and a spumavirus (e.g. a human spumavirus). The invention also encompasses immunogenic amino acid sequences (ii) of any member of the dsDNA Viruses group including (and without limitation thereto) any member of the family Adenoviridae inclusive of a mastadenovirus (eg, a human adenovirus) and an aviadenovirus (eg, a fowl adenovirus), although without limitation thereto; any member of the family Herpesviridae inclusive of an Alphaherpesvirinae such as, but not limited to, a simplexvirus (e.g., a human herpesvirus 1) and a varicellovirus (e.g. a human herpesvirus 3); a Betaherpesvirinae such as, but not limited to, a cytomegalovirus (e.g., human herpesvirus 5), a muromegalovirus (e.g., a mouse cytomegalovirus 1), a roseolovirus (e.g., a human herpesvirus 6); a Gammaherpesvirinae such as, but not limited to, a lymphocryptovirus (e.g., a human herpesvirus 4), a rhadinovirus (e.g., an ateline herpesvirus 2); any member of the family Papillomaviridae inclusive of a papillomavirus, preferably human papillomavirus, and preferably subtypes 16, 18, 31, 33, 35, 39, 45, 51, 52, 56, 58, and 59, although without limitation thereto; any member of the family Iridoviridae inclusive of a ranavirus and such as, epizootic haematopoietic necrosis virus, but not limited to; any member of the family Polyomaviridae inclusive of a polyomavirus and preferably murine polymavirus; any member of the family Poxviridae inclusive of an orthopoxvirus (e.g., a vaccinia virus), a parapoxvirus (e.g., a orf virus), an avipoxvirus (e.g., a fowlpox virus), an capripoxvirus (e.g., a sheep pox virus), a leporipoxvirus (e.g., a myxoma virus) and a suipoxvirus (e.g., a swinepox virus).

[0337] The invention also encompasses immunogenic amino acid sequences (ii) of any member of any member of the ssDNA Viruses group including (and without limitation thereto) any member of the family Parvoviridae inclusive of a parvovirus (e.g., Rheumatoid arthritis virus, B19).

[0338] The invention also encompasses immunogenic amino acid sequences (ii) of any member of the DNA Reverse Transcribing Viruses group including any member of the family Hepadnaviridae inclusive of an orthohepadnavirus (e.g. a hepatitis B virus) and an avihepadnavirus (e.g. a duck hepatitis B virus), although without limitation thereto.

### Nucleic Acids Encoding Amino Acid Sequences of Isolated Proteins

[0339] A related aspect of the invention provides an isolated nucleic acid encoding the amino acid sequence of the isolated protein of the preceding aspect.

[0340] In certain particularly preferred embodiments, the isolated nucleic acid of this aspect is an isolated nucleic acid encoding the amino acid sequence set forth in SEQ ID NOS:1-4 or SEQ ID NOS:32, 389, 391 or 395 or a fragment, variant, or derivative thereof.

[0341] In certain embodiments, the isolated nucleic acid of this aspect is an isolated nucleic acid encoding the amino acid sequence set forth in SEQ ID NOS:20, 22, 24, 26, 28, 30, 384, 393, 397, or 402-405, or a fragment or variant thereof.

[0342] In certain embodiment, the isolated nucleic acid of this aspect comprises the nucleotide sequence set forth in SEQ ID NOS:11, 12, 13, 14, 21, 23, 25, 26, 27, 29, 31, 33, 385, 386, 388, 390, 392, 394, 396, or 398-401.

[0343] The isolated nucleic acid of this aspect will comprise a nucleotide sequence of an insect-specific flavivirus; and a nucleotide sequence encoding an immunogenic amino acid sequence, wherein the immunogenic nucleotide sequence is not of an insect-specific flavivirus.

[0344] Preferably, the nucleotide sequence of the isolated nucleic acid of this aspect that is of the insect-specific flavivirus is of an insect-specific flavivirus capable of infecting a plurality of different insects. In certain preferred embodiments, said insect-specific flavivirus has a native host selected from the group consisting of Coquillettidia spp.; Aedes spp.; Anopheles spp.; Mansonia spp.; Toxorhynchites spp. and Culex spp.

[0345] Preferably, the insect-specific flavivirus of (i) is selected from the group consisting of PCV; BJV; BgV; and LiCV. In embodiments, the insect-specific flavivirus of (i) may be selected from the group consisting of PRV; CFAV; and KRBV.

[0346] In particularly preferred embodiments, the nucleotide sequence of the isolated nucleic acid of this aspect that is of the insect-specific flavivirus comprises a nucleotide sequence encoding an amino acid sequence set forth in SEQ ID NOS:5-7 or 387, or a fragment or variant thereof. Exemplary nucleotide sequences encoding the amino acid sequences set forth in SEQ ID NOS:5-7 and 387 are set forth in SEQ ID NOS:39-41 and 386, respectively.

[0347] In embodiments, the nucleotide sequence of the isolated nucleic acid of this aspect that is of the insect-specific flavirus comprises a nucleotide sequence encoding an amino acid sequence set forth in SEQ ID NOS:17-19, or a fragment or variant thereof. Exemplary nucleotide sequences encoding the amino acid sequences set forth in SEQ ID NOS:17-19 are set forth in SEQ ID NOS:42-44, respectively.

[0348] In preferred embodiments of the isolated nucleic acid of this aspect, the nucleotide sequence that encodes the immunogenic amino acid sequence encodes at least part of a protein of a flavivirus that is not insect-specific.

[0349] In preferred embodiments, said immunogenic amino acid sequence is of at least part of a structural protein of a flavivirus that is not insect-specific. Suitably, the structural protein is selected from the group consisting of a Capsid; prM; and Envelope protein. Preferably, the structural protein is a prM protein and/or an Envelope protein.

[0350] Additionally or alternatively, said nucleotide sequence encoding the immunogenic amino acid sequence may encode at least part of a non-structural protein of the insect-specific flavivirus producible by the vector. Suitably, the non-structural protein is selected from the group consisting of an NS1; NS2A; NS2B; NS3; NS4A; NS4B; and NS5 protein.

[0351] Preferably, said nucleotide sequence of the isolated nucleic acid of this aspect encoding the immunogenic amino acid sequence encodes an immunogenic amino acid sequence of a flavivirus selected from the group consisting of ZIKV; WNV; Dengue; JEV; YFV; TBEV, SLEV, MVEV; Duck tembusu virus; TMEV; Usutu virus; Sepik virus; Wesselsbron virus; BYD; and SV. In a particularly preferred embodiment, said virus is selected from the group consisting of West Nile virus; Zika virus; and Dengue virus.

[0352] In particularly preferred embodiments, said nucleotide sequence that encodes the immunogenic amino acid sequence is or comprises a nucleotide sequence encoding an amino acid set forth in SEQ ID NOS:8-10, or a fragment or variant thereof. Exemplary nucleotide sequences encoding the amino acid sequences set forth in SEQ ID NOS:8-10 are set forth in SEQ ID NOS:43-45, respectively.

[0353] It will be understood that the isolated nucleic acid according to this aspect may, but need not necessarily, be capable of replicating an isolated chimeric insect-specific flavivirus comprising the isolated protein of the directly preceding aspect. As used herein, an isolated nucleic acid that is “capable of replicating” an isolated chimeric insect-specific flavivirus will be understood to be a nucleic acid that can, at least under certain circumstances, be used to produce a complete, functioning, isolated chimeric insect-specific flavivirus.

[0354] As will be readily understood by the skilled person, viral replication occurs in a suitable host cell relying upon the host cell machinery. For an overview of viral replication, the skilled person is directed to Carter and Saunders, Virology: Principles and Applications, John Wiley & Sons Inc (New York, 2013), incorporated herein by reference. Generally, viral replication involves steps of (a) expression of viral proteins, including structural and non-structural proteins, from the viral genetic material; (b) replication of the viral genetic material; and (c) packaging of the replicated viral genetic material into the viral structural proteins.

[0355] For the purposes of this invention, an isolated nucleic acid that is “capable of replicating” an isolated chimeric insect-specific flavivirus will be understood to refer to an isolated nucleic acid that, when combined with a suitable host cell, results in the replication of the flavivirus. Examples of approaches to combine the isolated nucleic acid with the suitable host cell include direct transfection of the host cell with the isolated nucleic acid, including stable and transient transfection as are well known in the art, and/or transcription of the nucleic acid within the host cell, e.g. from a suitable vector as hereinbelow described.

[0356] Also provided according to the invention are genetic constructs comprising the isolated nucleic acid of this aspect. Suitably, the genetic construct may be in the form of, or comprise genetic components of, a plasmid, bacteriophage, a cosmid, a yeast or bacterial artificial chromosome as are well understood in the art. Genetic constructs may be suitable for maintenance and propagation of an isolated nucleic acid in bacteria or other host cells, for manipulation by recombinant DNA technology and/or expression of the nucleic acid or an encoded protein as herein described.

[0357] For the purposes of host cell expression, the genetic construct may be an expression construct. Suitably, the expression construct comprises one or more nucleic acids or variants described herein operably linked to one or more additional sequences in an expression vector.

[0358] An “expression vector” may be either a self-replicating extra-chromosomal vector such as a plasmid, or a vector that integrates into a host genome.

[0359] By “operably linked” is meant that said additional nucleotide sequence(s) is/are positioned relative to the nucleic acid of the invention preferably to initiate, regulate or otherwise control transcription.

[0360] In one embodiment, the additional nucleotide sequences are regulatory sequences. Regulatory nucleotide sequences will generally be appropriate for the host cell used for expression. Numerous types of appropriate expression vectors and suitable regulatory sequences are known in the art for a variety of host cells.

[0361] Typically, said one or more regulatory nucleotide sequences may include, but are not limited to, promoter sequences, leader or signal sequences, ribosomal binding sites, transcriptional start and termination sequences, translational start and termination sequences, and enhancer or activator sequences.

[0362] Constitutive or inducible promoters as known in the art may be used for genetic constructs of the invention. The promoters may be either naturally occurring promoters, or hybrid promoters that combine elements of more than one promoter.

[0363] In certain embodiments, the genetic construct of this aspect may comprise one or more small RNA target sequences.

[0364] As used herein, “small RNA” will be understood to refer to small, non-coding RNA molecules that have the capacity to bind to and regulate the expression, translation and/or replication of other nucleic acid molecules. The skilled person is directed to Ipsaro, J. J., & Joshua-Tor, L., 2015, Nature Struc. & Mol. Biol. 22 20 for a summary of summary of small RNAs. By way of non-limiting example, the skilled person will appreciate that small RNAs encompasses molecules referred to as ‘microRNA’, ‘miRNA’, or ‘siRNA’. However, it will be understood that all similar such molecules are included within the scope of small RNA as used herein.

[0365] A “small RNA target” will be understood to refer to a nucleotide sequence that is bound by or otherwise interacts with a small RNA, to facilitate regulation of a nucleic acid comprising said sequence.

[0366] In certain preferred embodiments, the small RNA target is a microRNA target.

[0367] In embodiments wherein the genetic construct includes a small RNA target, the small RNA target will suitably be adapted to regulate or otherwise modulate or control production or translation of a protein of the preceding aspect that is encoded by the genetic construct, and/or an isolated chimeric insect-specific flavivirus comprising said protein, in a cell. Preferably, the cell is an insect cell. Preferably the insect cell is a mosquito cell.

[0368] By way of example, the small RNA target may be adapted to be bound by small RNAs known to be produced in particular cell types, such as mosquito cells (although without limitation thereto). It will be appreciated that binding of the small RNA target in said cell types will typically constrain or prevent replication of a genetic construct comprising the small RNA target, a protein encoded by said genetic construct, and/or a chimeric insect-specific flavivirus comprising said nucleic acid and/or protein, in the cell.

[0369] In particularly preferred embodiments, the small RNA target is adapted to constrain or prevent translation of a protein of the preceding aspect, and/or replication of an isolated chimeric insect-specific flavivirus comprising said protein, in the midgut of a mosquito.

[0370] Host cells comprising genetic constructs as described above are also provided according to the invention. The host cell will typically be for nucleic acid and/or protein expression, and may be any suitable prokaryotic or eukaryotic cell, as are well-known in the art. For an overview of strategies for recombinant expression in host cells, the skilled person is directed to Lorence, Recombinant Gene Expression: Reviews and Protocols, Human Press (2011), incorporated herein by reference.

### Isolated Chimeric Insect-Specific Flaviviruses

[0371] A further aspect of the invention provides an isolated chimeric insect-specific flavivirus comprising the isolated protein; and the isolated nucleic acid that is capable of replicating the isolated chimeric insect-specific flavivirus, of the preceding aspects.

[0372] As hereinabove described, the isolated chimeric insect-specific flavivirus will be capable of infecting a suitable insect host and/or growing and replicating in suitable insect cell lines, but will not infect and/or grow or replicate, or will at least demonstrate substantially restricted ability to infect and/or grow or replicate, in at least wild type vertebrate cell lines.

[0373] In embodiments, the isolated chimeric insect-specific flavivirus comprises a genome consisting of or comprising a nucleotide sequence set forth in SEQ ID NOS: 11, 12, 13, 14, 21, 23, 25, 26, 27, 29, 31, 33, 385, 386, 388, 390, 392, 394, 396, or 398-401, or a fragment or variant thereof; and/or an isolated protein consisting of or comprising an amino acid sequence encoded by a nucleotide sequence set forth in SEQ ID NOS: 11, 12, 13, 14, 21, 23, 25, 26, 27, 29, 31, 33, 385, 386, 388, 390, 392, 394, 396, or 398-401, or a fragment or variant thereof.

[0374] In embodiments, the isolated chimeric insect-specific flavivirus comprises an isolated protein consisting of or comprising an amino acid sequence set forth in SEQ ID NOS:1-4, 32, 389, 391 or 395 or a fragment, variant, or derivative thereof; and/or a genome consisting of or comprising a nucleotide sequence set forth in SEQ ID NOS:11-14 or 33, 388, 390, or 394, or a fragment or variant thereof.

[0375] In embodiments, the isolated chimeric insect-specific flavivirus may comprise an isolated protein consisting of or comprising an amino acid sequence set forth in SEQ ID NOS:20, 22, 24, 26 28, 30, 384, 393, 397, or 402-405, or a fragment, variant, or derivative thereof; and/or a genome consisting of or comprising a nucleotide sequence set forth in SEQ ID NOS:21, 23, 25, 27, 29, 31, 385, 392, 396, 398, 399, or a fragment or variant thereof.

### Vectors Capable of Replicating Insect-Specific Flaviviruses

[0376] In a further aspect, the invention provides a vector comprising:

[0377] (i) the isolated nucleic acid of the above described aspect; and

[0378] (ii) an insect-specific promoter operably connected to the isolated nucleic acid (i).

[0379] The term “operably connected” is used in this context to mean that the insect-specific promoter (ii) is positioned to initiate, regulate or otherwise control transcription of (i). Suitably, the insect-specific promoter is capable of controlling transcription of (i) in an insect cell.

[0380] In particularly preferred embodiments, the vector of this aspect is or comprises a nucleotide sequence set forth in SEQ ID NOS:11-14 or 33, or a fragment or variant thereof. In embodiments, the vector of this aspect is or comprises a nucleotide sequence set forth in SEQ ID NOS:21, 23, 25, 27, 29, 31, or 385.

[0381] In preferred embodiments of this aspect, the isolated nucleic acid (i) is capable of replicating an isolated chimeric insect-specific flavivirus according to the directly preceding aspect.

[0382] Without limitation thereto, preferred vectors of this aspect of the invention are particularly adapted for transfection into insect cells, wherein (i) is transcribed under the control of (ii), and a chimeric insect-specific flavivirus replicable by (i) subsequently replicates within the insect cell.

[0383] In some embodiments, the vector comprises one or more small RNA target sequences as hereinabove described, for regulation of replication of an isolated chimeric insect-specific flavivirus in one or more cells. Preferably, said cells are insect cells, preferably mosquito cells. Preferably, the one or more small RNA sequences prevent or constrain replication of the chimeric insect-specific flavivirus in one or more cells of the midgut of a mosquito. Preferably, the inclusion of the small RNA target sequence in the vector of this aspect prevents or constrains replication of the chimeric insect-specific flavivirus in a mosquito, upon ingestion of the vector or a chimeric insect-specific flavivirus comprising the vector, by a mosquito.

### Insect-Specific Promoters

[0384] In preferred embodiments of this aspect, the insect-specific promoter (ii) of the vector is of an insect virus.

[0385] As set forth in the examples, the inventors have discovered that the use of an insect-specific promoter from an insect virus can facilitate transcription to initiate replication of insect-specific flaviviruses in insect cells upon transfection of the insect cells with a vector encoding the ISF.

[0386] In certain preferred embodiments, the insect-specific promoter of (ii) is of an insect virus selected from the group consisting of Orgyia pseudotsugata multicapsid nucleopolyhedrosis virus (OpMNPV); Autographa californica nucleopolyhedrovirus (AcMNP); and Spodoptera exigua multiple nucleopolyhedrovirus (SeMNPV).

[0387] In certain preferred embodiments, the insect-specific promoter of (ii) is a promoter of an insect virus gene selected from the group consisting of an immediate-early 2 (IE2) gene; a polyhedrin gene; a p10 gene; and an orf46 gene.

[0388] In preferred embodiments, the insect promoter (ii) is or comprises a nucleotide sequence set forth in SEQ ID NOS:15-16 or SEQ ID NOS:382-383.

[0389] In certain particularly preferred embodiments, the insect promoter comprises the nucleotide sequence of the OpIE2 promoter set forth in SEQ ID NO:15, or a fragment or variant thereof. Preferably, the insect promoter comprises a fragment of the nucleotide sequence of the OpIE2 promoter set forth in SEQ ID NO:15. Preferably, said fragment features a deletion of one or more consecutive nucleotides relative to SEQ ID NO:15. Preferably said one or more consecutive nucleotides are located 3′ of the transcriptional start site of SEQ ID NO:15. Preferably, said fragment features of deletion of 1, 2, 3, 4, 5, 6, 7, 8, 9, 10, 11, 12, 13, 14, 15, 16, 17, 18, 19, 20, 21, 22, 23, or 24 nucleotides from the 3′ end of SEQ ID NO:15.

[0390] In one particularly preferred embodiment, the insect promoter of (ii) comprises SEQ ID NO:16, which is referred to herein as OpIE2-CA. With reference to the examples, it will be appreciated that use of the insect promoter set forth in SEQ ID NO:16 resulted in particularly effective replication of insect-specific flaviviruses in insect cells when transcription of the virus was driven by the promoter of a vector of this aspect.

### Methods of Producing Vectors

[0391] The invention further provides a method of producing a vector, the method including the step of operably connecting the isolated nucleic acid of the previously described aspect with an insect-specific promoter, to thereby produce the vector.

[0392] Preferably, the vector produced according to the method of this aspect is the vector of the directly preceding aspect.

[0393] In preferred embodiments, the method of producing a vector according to this aspect includes the step of joining at least two nucleic acids using a nucleic acid sequence amplification technique, to thereby produce the vector.

[0394] As used herein “nucleic acid sequence amplification” includes but is not limited to techniques such as polymerase chain reaction (PCR) as for example described in Chapter 15 of CURRENT PROTOCOLS IN MOLECULAR BIOLOGY Eds. Ausubel et al. (John Wiley & Sons NY USA 1995-2001); strand displacement amplification (SDA); rolling circle replication (RCR) as for example described in International Application WO 92/01813 and International Application WO 97/19193; nucleic acid sequence-based amplification (NASBA) as for example described by Sooknanan et al. 1994, Biotechniques 17 1077; ligase chain reaction (LCR) as for example described in International Application WO89/09385 and Chapter 15 of CURRENT PROTOCOLS IN MOLECULAR BIOLOGY supra; Q-β replicase amplification as for example described by Tyagi et al., 1996, Proc. Natl. Acad. Sci. USA 93 5395; and helicase-dependent amplification as for example described in International Publication WO 2004/02025.

[0395] In a particularly preferred embodiment, the nucleic acid sequence amplification technique is a Circular Polymerase Extension Cloning (CPEC) technique, as described in Quan and Tian (2009) PLOS ONE, 4(7): e6441, incorporated herein by reference.

[0396] It will be appreciated that CPEC, while using a PCR protocol, can achieve ligation of fragments in a single cycle of PCR without amplification, in a strict sense, occurring. As such, as used herein, a “nucleic acid sequence amplification” technique will be understood to encompass a protocol capable of amplifying a nucleic acid, but that does not necessarily result in amplification sensu stricto.

[0397] Preferably, the method of producing a vector according to this aspect includes the step of joining a nucleic acid comprising the insect-specific promoter with at least one nucleic acid of the previously described aspect.

[0398] In preferred embodiments, the method includes the step of joining a nucleic acid comprising the insect-specific promoter with a plurality of nucleic acids which together form a preferred nucleic acid of the previously described aspect. Preferably, said nucleic acid is capable of replicating a chimeric insect-specific flavivirus.

[0399] In these embodiments, preferably, each of the plurality of nucleic acids encodes at least part of a protein of the chimeric insect-specific flavivirus. The components of the chimeric insect-specific flavivirus suitably include structural and non-structural insect-specific flavivirus proteins (as hereinabove described); and an immunogenic amino acid sequence.

[0400] The immunogenic sequence will be in a suitable form as hereinabove described. In preferred embodiments, the immunogenic sequence is of one or more structural or non-structural proteins of a flavivirus that is not insect-specific. In particularly preferred embodiments, the immunogenic sequence is of one or more structural proteins of a flavivirus that is not insect-specific.

[0401] Preferably, each of the plurality of nucleic acids that is joined according to the method of this aspect comprises nucleotide sequence overlap with respect to an adjacent nucleic acid. With reference to the examples, it will be appreciated that such an arrangement can facilitate effective joining of the nucleic acids using a nucleic acid amplification technique, such as CPEC.

[0402] With reference to the examples, it will be appreciated that particularly preferred vectors of the invention, such as the vector comprising the nucleotide sequence set forth in SEQ ID NO:11, were constructed by joining five nucleic acids using a CPEC technique, the nucleic acids respectively comprising:

[0403] (I) a nucleic acid comprising an insect promoter flanked by respective portions of the 3′ and 5′ UTRs of Palm Creek virus;

[0404] (II) a nucleic acid encoding a portion of the 5′ UTR, and the Capsid protein of Palm Creek virus, and prM; and Envelope proteins of West Nile virus;

[0405] (III) a nucleic acid encoding NS1; NS2A; and NS2B proteins of Palm Creek virus;

[0406] (IV) a nucleic acid encoding NS3; NS4A; and NS4B flavivirus proteins of Palm Creek virus; and

[0407] (V) a nucleic acid encoding NS5 protein and a portion of the 3′ UTR of Palm Creek virus,

[0408] wherein:

[0409] (I) comprises nucleotide sequence overlap with (V) and (II);

[0410] (II) comprises nucleotide sequence overlap with (I) and (III);

[0411] (III) comprises nucleotide sequence overlap with (II) and (IV);

[0412] (IV) comprises nucleotide sequence overlap with (III) and (V); and

[0413] (V) comprises nucleotide sequence overlaps with (IV) and (I).

[0414] It will be appreciated that, in the particularly preferred embodiments illustrated in Example 8, the immunogenic amino acid sequence encoded by the vector is in the form of the prM and Envelope proteins encoded by (II), and the amino acid sequence of the insect-specific flavivirus is in the form of the Capsoid protein encoded by (II) and the non-structural proteins encoded by (III)-(V).

[0415] A related aspect provides a vector produced according to the method of this aspect.

Proteins and Chimeric Insect-Specific Flaviviruses Produced from Vectors

[0416] Further aspects of the invention provide an isolated protein or isolated chimeric insect-specific flavivirus, respectively, produced from a vector encoding according to the directly preceding aspects.

[0417] An isolated protein may be produced from said vector by any suitable approach, such as hereinabove described in relation to expression vectors generally.

[0418] Typically, the production of an isolated chimeric insect-specific flavivirus from said vector will require transfection of a suitable cell with the vector, wherein transcription of the nucleotide sequence of the previously described aspect with is capable of replicating a chimeric insect-specific flavivirus occurs, followed by replication of the insect-specific flavivirus in the host cell.

[0419] As hereinabove described, chimeric insect-specific flaviviruses of the invention do not replicate, or at least demonstrate substantially restricted replication in at least wild type vertebrate cells. As such, cells used for production of the isolated insect-specific flavivirus according to this aspect will typically be insect cells. However, at least for some ISFs, it has been demonstrated that some degree (typically trace amounts) of replication can occur in certain mutant vertebrate cells (e.g. Tree et al. (2016) Virology, 497, 81-91, incorporated herein by reference). As such, in some cases, production of insect-specific flaviviruses according to the method of this aspect may be performed by transfection of suitably mutant non-insect cells, e.g. mutant vertebrate cells.

Methods of Producing Chimeric-Insect Specific Flaviviruses from Vectors Using Insect Cells

[0420] A further aspect of the invention provides a method of producing an isolated chimeric insect-specific flavivirus comprising an isolated protein of the above-described aspect, the method including the steps of:

[0421] (a) combining a vector comprising (i) a nucleotide sequence capable of replicating a chimeric insect-specific flavivirus comprising the isolated protein of above-described aspect; and (ii) an insect-specific promoter operably connected to (i), with an insect cell; and

[0422] (b) allowing the chimeric insect-specific flavivirus replicable by (i) to replicate in the insect cell,

[0423] to thereby produce the isolated chimeric insect-specific flavivirus.

[0424] Suitably, combining the vector with the insect cell according to this aspect is in the form of transfection of the insect cell with the vector.

[0425] In some preferred embodiments, the insect cell according to this aspect is a mosquito cell. In preferred embodiments, the mosquito cell is an Aedes albopictus cell, preferably C6/36 or C7/10.

[0426] In a particularly preferred embodiment, the mosquito cell is a C3/36 cell.

[0427] In some preferred embodiments, the insect cell according to this aspect is a fly cell. Preferably, the fly cell is a fruit fly cell, preferably a Drosophila cell. Preferably, the Drosophila cell is an S2 cell.

[0428] In preferred embodiments of the method of this aspect, the flavivirus is produced in the insect cell at a titre of at least: 10⁴/ml; 10⁵/ml; 10⁶/ml; 10⁷/ml; or 10⁸/ml. In one particularly preferred embodiment, the flavivirus is produced in the insect cell at a titre of greater than 10⁷/ml.

[0429] As set out in the examples, certain preferred vectors of the invention comprising a nucleotide sequence capable of replicating chimeric insect-specific flavivirus comprising ISF virus proteins and an immunogenic sequence in the form of proteins of a flavivirus that is not insect-specific were produced by transfection of insect cells with the vector. Subsequently, substantial replication of the chimeric insect-specific flavivirus in the insect cells was observed.

[0430] By way of example, for PCV/WNV_{KUN}-prME (SEQ ID NO:1), the isolated chimeric insect-specific flavivirus was produced at a titre of 1.7×10⁶/ml. For PCV/ZIKA-prME (SEQ ID NO:2), the isolated chimeric insect-specific flavivirus was produced at a titre of 3.9×10⁷/ml. For PCV/DENV2-prME (SEQ ID NO:3), the isolated chimeric insect-specific flavivirus was produced at a titre of 3.6×10⁵/ml.

[0431] A related aspect provides an isolated chimeric insect-specific flavivirus produced according to the method of this aspect.

### Modified Chimeric Insect-Specific Flaviviruses, and Proteins and Nucleic Acids Thereof

[0432] A further aspect of the invention provides a method of modifying a chimeric insect-specific flavivirus, a protein of a chimeric insect-specific flavivirus, and/or or a nucleic acid of a chimeric insect-specific flavivirus, including the step of replicating a chimeric insect-specific flavivirus in a cell, whereby one or more mutations are incorporated into the chimeric insect-specific flavivirus, a protein thereof, and/or a nucleotide sequence thereof, to thereby modify the chimeric insect-specific flavivirus, protein thereof, and/or nucleic acid thereof.

[0433] Preferably, the step of replicating the chimeric insect-specific flavivirus according to the method of this aspect includes a plurality of replication cycles. Said plurality of replication cycles may suitably be in the form of ‘serial passaging’ of the chimeric insect-specific flavivirus, as is known in the art.

[0434] Preferably, the chimeric insect-specific flavivirus is replicated in an insect cell, preferably a mosquito cell, such as herein described, e.g. C6/36 or C7/10 cells, although without limitation thereto.

[0435] Preferably, the method of this aspect improves or enhances efficiency of replication of the chimeric insect specific flavivirus in one or more cells. Preferably, said one or more cells are insect cells, preferably mosquito cells.

[0436] With reference to Example 18, it will be appreciated that serial passaging of a chimeric insect-specific flavivirus as described herein in mosquito cells resulted in accumulation in mutations in the nucleotide sequence of the chimeric insect-specific flavivirus (cf. SEQ ID NOS:400 and 401). Additionally, as set forth in FIG. 86, increased efficiency of replication of serially passaged chimeric insect-specific flaviviruses in mosquito cells was observed.

[0437] Related aspects of the invention provide isolated modified chimeric-insect specific flaviviruses, isolated proteins, and isolated nucleic acids produced according to the method of this aspect.

Compositions Comprising Isolated Proteins and/or Chimeric Insect-Specific Flaviviruses

[0438] Still another aspect of the invention provides a composition comprising an isolated protein and/or an isolated chimeric insect-specific flavivirus of the preceding aspects.

[0439] In some embodiments of this aspect, the composition is a pharmaceutical composition. In these embodiments, the one or more carriers, diluents, or excipients will be pharmaceutically acceptable carriers, diluents, or excipients.

[0440] By “pharmaceutically-acceptable carrier, diluent or excipient” is meant a solid or liquid filler, diluent or encapsulating substance that may be safely used in systemic administration to a subject.

[0441] Depending upon the particular route of administration, a variety of carriers, well known in the art, may be used. These carriers may be selected from the group including sugars, starches, cellulose and its derivatives, malt, gelatine, talc, calcium sulphate, vegetable oils, synthetic oils, polyols, alginic acid, phosphate buffered solutions, emulsifiers, isotonic saline and salts such as mineral acid salts including hydrochlorides, bromides and sulphates, organic acids such as acetates, propionates and malonates and pyrogen-free water. A useful reference describing pharmaceutically acceptable carriers, diluents and excipients is Remington's Pharmaceutical Sciences (Mack Publishing Co. N.J. USA, 1991) which is incorporated herein by reference.

[0442] Dosage forms of compositions according to this aspect include tablets, dispersions, suspensions, injections, solutions, oils, syrups, troches, capsules, suppositories, aerosols, transdermal patches and the like. These dosage forms may also include injecting or implanting controlled releasing devices designed specifically for this purpose or other forms of implants modified to act additionally in this fashion. Controlled release of the therapeutic agent may be effected by coating the same, for example, with hydrophobic polymers including acrylic resins, waxes, higher aliphatic alcohols, polylactic and polyglycolic acids and certain cellulose derivatives such as hydroxypropylmethyl cellulose. In addition, the controlled release may be effected by using other polymer matrices, liposomes and/or microspheres.

[0443] Compositions of the present invention suitable for enteral, oral or parenteral administration may be presented as discrete units such as capsules, sachets or tablets each containing a pre-determined amount of one or more therapeutic agents of the invention, as a powder or granules or as a solution or a suspension in an aqueous liquid, a non-aqueous liquid, an oil-in-water emulsion or a water-in-oil liquid emulsion. Such compositions may be prepared by any of the methods of pharmacy but all methods include the step of bringing into association one or more agents as described above with the carrier which constitutes one or more necessary ingredients. In general, the compositions are prepared by uniformly and intimately admixing the agents of the invention with liquid carriers or finely divided solid carriers or both, and then, if necessary, shaping the product into the desired presentation.

[0444] Preferably, the pharmaceutical composition of this aspect is a vaccine.

[0445] In some embodiments, the composition of this aspect is a diagnostic composition. The diagnostic composition may be for in vivo or in vitro use. Preferably, the diagnostic composition is for in vitro use.

[0446] The diagnostic composition may comprise one or more buffers, solutions, blocking agents, and/or detection reagents as are well known in the art. In some embodiments, the diagnostic composition may be in kit form. Kits may include the isolated protein and/or isolated chimeric insect-specific flavivirus of the preceding aspects and one or more of detection reagents (e.g enzymes and substrates, digoxigenin); secondary antibodies (optionally labelled); buffers, solutions and blocking agents; and/or labels selected from a group including an enzyme, a fluorophore, a chemiluminescent molecule, biotin, radioisotope or any other suitable label. Examples of suitable enzyme labels useful in the present invention include alkaline phosphatase, horseradish peroxidase, luciferase, β-galactosidase, glucose oxidase, lysozyme, malate dehydrogenase and the like. The enzyme label may be used alone or in combination with a second enzyme in solution or with a suitable chromogenic or chemiluminescent substrate.

[0447] Examples of chromogens include diaminobanzidine (DAB), permanent red, 3-ethylbenzthiazoline sulfonic acid (ABTS), 5-bromo-4-chloro-3-indolyl phosphate (BCIP), nitro blue tetrazolium (NBT), 3,3′,5,5′-tetramethyl benzidine (TNB) and 4-chloro-1-naphthol (4-CN), although without limitation thereto.

[0448] A non-limiting example of a chemiluminescent substrate is Luminol™, which is oxidized in the presence of horseradish peroxidase and hydrogen peroxide to form an excited state product (3-aminophthalate).

[0449] Fluorophores may be fluorescein isothiocyanate (FITC), tetramethylrhodamine isothiocyanate (TRITC), allophycocyanin (APC), Texas Red (TR), Cy5 or R-Phycoerythrin (RPE), although without limitation thereto.

[0450] Radioisotope labels may include ¹²⁵I, ¹³¹I, ⁵¹Cr and ⁹⁹Tc, although without limitation thereto.

[0451] Other antibody labels that may be useful include colloidal gold particles and digoxigenin.

[0452] In one particularly preferred embodiment wherein the diagnostic composition is for in vitro use, the composition is for use in performing an Enzyme-Linked Immunosorbent Assay (ELISA), such as a direct or indirect ELISA. Suitably compositions for use in ELISA are well known to those skilled in the art; for an overview of ELISA reagents and protocols the skilled person is directed to Crowther, Methods in Molecular Biology, Volume 42: ELISA, Theory and Practice, Humana Press, (New Jersey, 1995), incorporated herein by reference.

[0453] In one particularly preferred embodiment wherein the diagnostic composition is for in vitro use, the composition is for use in performing a lateral flow immunoassay. As will be understood by the skilled person, generally, lateral flow assays involve movement of liquid sample containing an analyte of interest, typically by capillary action, across a test strip containing molecules (such as antibodies) capable of interacting with the analyte. For an overview of lateral flow immonassays and suitable reagents and protocols, the skilled person is directed to Koczula and Gallotta (2016) Essays in Biochemistry 60: 111-120, incorporated herein by reference.

### Therapeutic Methods Comprising Administration of Insect-Specific Flaviviruses

[0454] An aspect of the invention provides a method of eliciting an immune response in a subject, the method including the step of administering an effective amount of the isolated chimeric insect-specific flavivirus or pharmaceutical composition comprising the same as described herein to subject, to thereby elicit an immune response in the subject.

[0455] By “elicits or eliciting an immune response” means inducing, activating or stimulating one or more components or elements of the immune system of an animal. The one or more components or elements of the immune system may be of the innate and/or adaptive immune systems, including cellular components (e.g lymphocytes, antigen presenting cells, dendritic cells, myelomonocytic cells) and/or molecular components (e.g. cytokines, chemokines, antibodies), although without limitation thereto.

[0456] In some embodiments, the immune response is a protective immune response which is responsive to subsequent challenge or infection by a pathogen.

[0457] Accordingly a related aspect of the invention provides a method of immunizing a subject against a pathogen, the method including the step of administering an effective amount of the pharmaceutical composition of the thirteenth aspect to the subject, to thereby immunize the subject against the pathogen.

[0458] Another aspect of the invention provides a method of treating or preventing a disease, disorder, or condition in a subject, the method including the step of administering an effective amount of an isolated chimeric insect-specific flavivirus or pharmaceutical composition comprising the same as described herein to the subject, to thereby treat or prevent the disease, disorder or condition in the subject.

[0459] Preferably, the disease, disorder, or condition according to these aspects is associated with a viral infection. Suitably, in these embodiments, the immunogenic sequence of the isolated protein or chimeric insect-specific flavivirus is of or derived from the virus with which the disease, disorder, or condition is associated.

[0460] Preferably, the disease, disorder, or condition is associated with a viral infection. Preferably, the viral infection is a flaviviral infection. Preferably, the flaviviral infection is an infection with a virus selected from the group consisting of ZIKV; WNV; Dengue; JEV; YFV; TBEV, SLEV, MVEV; Duck tembusu virus; TMEV; Usutu virus; Sepik virus; Wesselsbron virus; BYD; and SV. In a particularly preferred embodiment, said virus is selected from the group consisting of West Nile virus; Zika virus; and Dengue virus.

[0461] In particularly preferred embodiments said virus is selected from the group consisting of Zika virus; West Nile Virus; and Dengue virus. Preferably, the West Nile virus is KUNV. Preferably, the Dengue virus is DENV2.

[0462] It will be appreciated that the pharmaceutical composition and/or methods of these aspects may be effective against a plurality of different pathogens and/or effective in treating a plurality of different diseases, disorders or conditions as described above.

[0463] Accordingly, as hereinabove described, in some embodiments the isolated protein may comprise one or more additional immunogenic amino acid sequences from one or more other viruses, bacteria, protozoa, worms or other pathogens. Typically, the one or more additional immunogenic amino acid sequences would be relatively short peptide epitopes (e.g 6-20 amino acids) fused to:

[0464] (i) the amino acid sequence of a protein encoded by the genome of an insect-specific flavivirus; and/or

[0465] (ii) the immunogenic amino acid sequence not encoded by the genome of an insect-specific flavivirus;

[0466] that do not inhibit or compromise the ability of the isolated protein to form a virus particle.

[0467] Any safe route of administration may be employed according to these aspects for providing a subject with the isolated protein, chimeric insect-specific flavivirus, or pharmaceutical composition. For example, enteral, oral, rectal, parenteral, sublingual, buccal, intravenous, intra-articular, intra-muscular, intra-dermal, subcutaneous, inhalational, intraocular, intraperitoneal, intracerebroventricular, transdermal and the like may be employed.

[0468] The isolated protein, chimeiric insect-specific flavivirus or pharmaceutical composition according to these aspects may be administered in a manner compatible with the dosage formulation, and in such amount as is pharmaceutically effective. The dose administered to a patient, in the context of the present invention, should be sufficient to effect a beneficial response in a patient over an appropriate period of time. The quantity of agent(s) to be administered may depend on the subject to be treated inclusive of the age, sex, weight and general health condition thereof, factors that will depend on the judgement of the practitioner.

[0469] It will also be appreciated that treatment methods and pharmaceutical compositions may be applicable to prophylactic or therapeutic treatment of a subject that is an animal, inclusive of humans and non-human mammals such as livestock (e.g. horses, cattle and sheep, crocodiles, ducks, chickens, turkeys), companion animals (e.g. dogs and cats), laboratory animals (e.g. mice, rats and guinea pigs) and performance animals (e.g. racehorses, greyhounds and camels), although without limitation thereto. In one preferred embodiment, the subject is a human. In another preferred embodiment, the subject is a crocodile.

[0470] A related aspect of the invention provides a method of producing an antibody with at least partial specificity against an immunogenic sequence in a subject, the method including the step of administering an isolated chimeric insect-specific flavivirus or pharmaceutical composition comprising the same as described herein to a subject, wherein an antibody is produced in the subject against the immunogenic sequence of the isolated chimeric insect-specific flavivirus, to thereby produce the antibody in the subject.

[0471] Suitably, the antibody may be extracted, purified, and/or isolated from the subject after production.

[0472] It will be appreciated that the directly preceding aspect may have application in the production of antibodies for research or diagnostic purposes. Without limitation, the subject may be any suitable animal subject for producing antibodies, such as a chicken, goat, guinea pig, hamster, horse, mouse, rat, sheep, or rabbit, as are well known in the art.

### Methods for Detecting, Identifying or Screening for Antibodies

[0473] The invention also provides detection or diagnosis of antibodies that bind to the immunogenic sequence of the isolated protein or chimeric insect-specific flavivirus.

[0474] Accordingly, yet a further aspect of the invention provides a method of detecting, identifying or screening for an antibody in a sample, the method including the steps of combining the diagnostic composition of the thirteenth aspect with a sample, wherein binding of an antibody in the sample to an immunogenic amino acid sequence of the isolated protein or isolated chimeric insect-specific flavivirus of the diagnostic composition facilitates detecting, identifying or screening for the antibody in the sample.

[0475] Generally, the term “antibody” includes any product of the immunoglobulin gene complex, inclusive of antibody fragments.

[0476] The method according to this aspect may be an in vitro method or an in vivo method.

[0477] In the particular context of an in vivo method according to this aspect, a “sample” will be understood to be present in, or a component or part of the subject, whereby the diagnostic composition is administered to the subject and the antibody is detected in situ. For a non-limiting review of in vivo diagnostics, the skilled person is directed to Freise and Wu (2015) Molecular Immunology, 67(2A), 142-152, incorporated herein by reference.

[0478] In embodiments where the method is an in vitro method, suitably the sample is obtained or obtainable from a subject. The sample may be a fluid sample, a cell sample, a tissue sample, a secretion, waste product or any other sample obtained or obtainable from a subject. By way of example, samples may include urine, whole blood, plasma, serum, cerebrospinal fluid, tears, perspiration, smears, skin punches, swabs, biopsies, hair, faeces, semen and sputum, although without limitation thereto.

[0479] In certain preferred embodiments wherein the method of this aspect is an in vitro method, detection of the antibody is performed using an enzyme-linked immunosorbent assay (ELISA) comprising the isolated protein, chimeric insect-specific flavivirus, or composition of the preceding aspects. The ELISA may be a direct ELISA or an indirect ELISA. Reference in regard to ELISA assays is provided in Crowther, supra.

[0480] In certain preferred embodiment wherein the method of this aspect is an in vitro method, detection of the antibody is performed using a lateral flow immunoassay.

[0481] Preferably, the antibody of this aspect is produced in response to a viral infection. Suitably, in these embodiments, an immunogenic sequence of the isolated insect-specific flavivirus or virus particle is of or derived from the virus with which the disease, disorder, or condition is associated.

[0482] Preferably, the viral infection is selected from the group consisting of ZIKV; WNV; Dengue; JEV; YFV; TBEV, SLEV, MVEV; Duck tembusu virus; TMEV; Usutu virus; Sepik virus; Wesselsbron virus; BYD; and SV.

[0483] In particularly preferred embodiments said virus is selected from the group consisting of Zika virus; West Nile Virus; and Dengue virus. Preferably, the West Nile virus is KUNV. Preferably, the Dengue virus is DENV2.

[0484] Also within the scope of this aspect are methods of screening for a plurality of antibodies, wherein the plurality of antibodies bind to a respective plurality of immunogenic sequences of the isolated protein or chimeric insect-specific flavivirus.

### EXAMPLES

### Example 1. Materials and Methods

### Cell Culture

[0485] C6/36 (Aedes albopictus) cells were cultured at 28° C. in RPMI 1640 medium supplemented with 5% foetal bovine serum (FBS), respectively. Wild-type (WT) and interferon-α/β receptor deficient (IFNAR^{-/-}) mouse embryonic fibroblasts (MEF) were cultured in Dulbecco's modified Eagle's medium (DMEM) supplemented with 5% FBS and grown at 37° C. with 5% CO₂. All media contained 50 U penicillin/mL, 50 mg streptomycin/mL and 2 mM L-glutamine

### Virus Culture

[0486] PaRV (NC_027817.1), PCV (KC505248.1), BinJV (SEQ ID NO:40), LiCV (SEQ ID NO:386), BgV (SEQ ID NO:41), and WNV_{KUN} (AY274504) viral stocks were propagated in C6/36 cells incubated at 28° C. for 5-7 days. Viral titres were assessed by infection of C6/36 cells with 10-fold serial dilutions of supernatant in 96-well plates and incubation for 5 days. The cell supernatant was aspirated and the monolayers fixed with acetone fixative buffer (20% acetone, 0.02% bovine serum albumin (BSA) in phosphate buffered saline (PBS)). PaRV was detected by enzyme-linked immunosorbent assay (ELISA) using the PaRV-specific monoclonal antibody (mAb) 7D11, whereas WNV_{KUN} was detected using 4G2 [1]. Virus titres were calculated as 50% tissue culture infective dose (TCID₅₀) using the methods previously described by Reed and Muench [2].

### Preparation of Monoclonal Antibodies to PaRV

[0487] All animal procedures had received prior approval from The University of Queensland Animal Ethics Committee (AEC #SCMB/329/15/ARC) and where necessary were performed under ketamine:xylazil anaesthesia. Six-week old BALB/c mice (Animal Resources Centre, Murdoch, Western Australia, Australia) were immunised twice via the subcutaneous route with purified PaRV virions, along with inulin-based adjuvant Advax (Vaxine Ltd, Adelaide, Australia). Mice were kept on clean bedding and given food and water ad libitum. The mouse was boosted with PaRV virions four days prior to harvesting of the spleen. Fusion of the spleen cells with NS0 myeloma cells was performed as previously described [3]. Hybridomas secreting antibodies reactive to PaRV-infected C6/36 cells were identified by ELISA using previously described methods [4]. The target protein of each mAb was determined using PaRV-infected cell lysates in Western blot using previously published methods [4].

### Generation and Characterisation of a Modified OpIE2 Insect Promoter

[0488] OpIE2 promoter sequences characterised by Blissard and Rohrmann [5] were synthesised as gBlocks Gene Fragments (IDT). These fragments were cloned into a previously generated plasmid containing a sequence which, when expressed by itself, linked the UTR regions of the viral genome together [6]. A Gibson Assembly Master Mix (NEB) was used. Constructs were transformed into DH5c competent E. coli, and colony PCR using Taq DNA Polymerase (NEB) conducted to screen for viable colonies. Plasmids were extracted from overnight cultures of positive colonies using a NucleoSpin Plasmid Miniprep kit (Macherey-Nagel). Extracted plasmids were then sent for sequencing at the Australian Genome Research Centre.

### Generation of Viruses by CPEC

[0489] CPEC constructs were generated based on previously described methods [6]. Briefly, viral RNA was extracted using a NucleoSpin RNA Virus kit (Macherey-Nagel) and converted to cDNA using a qScript cDNA SuperMix (Quantabio). For each CPEC assembly, 0.1 pmol of each viral cDNA fragment was added to a Q5 PCR reaction (NEB) as per the manufacturer's instructions. Thermal cycling was carried out at 98° C. for 2 mins (one cycle), 98° C. for 30 secs, 55° C. for 30 secs, 72° C. for 6 mins (2 cycles), 98° C. for 30 secs, 55° C. for 30 secs, 72° C. for 8 mins (ten cycles). The entire CPEC reaction was transfected into cells and the passage 0 (P₀) cell culture supernatants harvested and stored at −80° C., five days post-transfection.

### Growth Kinetics

[0490] C6/36 cells seeded at a density of 1×10⁵ were inoculated in triplicate with a P₁ CPEC-derived and P7 wild-type virus stock at a multiplicity of infection (MOI) of 0.1. After incubation at 28° C. for 1 hr the inoculum was removed and the monolayer washed three times with sterile PBS before re-incubating at 28° C. with fresh RPMI 1640 with 2% FBS. Supernatant was harvested at 2 hrs, 24 hrs, 48 hrs, 72 hrs, 96 hrs and 120 hrs. Viral titres from each time point were determined using a TCID₅₀ assay as previously described. A two way-ANOVA was performed on the results using Graphpad Prism.

### IFA

[0491] Cells seeded at a density of 1×10⁵ on glass coverslips in a 24-well plate were transfected or infected as required. Following a 72 hr incubation, the coverslips were fixed with ice cold 100% acetone and air dried before storing at −20° C. Prior to staining, coverslips were blocked with blocking buffer (0.05 M Tris/HCl (pH 8.0), 1 mM EDTA, 0.15 M NaCl, 0.05% (v/v) Tween-20, 0.2% w/v casein) for 1 hr at room temperature. Coverslips were then incubated for 1 hr with primary antibody in blocking buffer. Following 3 washes with PBS containing 0.05% Tween-20 (PBST), secondary staining was carried out with Alexafluor 488-conjugated goat anti-mouse IgG (H+L) (Invitrogen) diluted 1:1000 in blocking buffer for 1 hr. A Hoechst 33342 nuclear stain (Invitrogen) was applied for 5 mins at room temperature. Following a final 3 washes with PBST, the coverslips were mounted onto glass microscope slides using ProLong Gold Anti-fade (Invitrogen). All coverslips were viewed under the ZEISS LSM 510 META confocal microscope.

### Cell Transfection

[0492] C6/36 cells were transfected with DNA using Effectene (Qiagen) or RNA using TransMessenger (Qiagen), as per the manufacturer's instructions. Wild-type and IFNAR^{-/-} MEF cells were transfected using Lipofectamine LTX (Invitrogen), as per the manufacturer's instructions.

### Example 2. CPEC Insect Promoter Optimisation

[0493] The OpIE2 promoter originally described by Blissard and Rohrmann [5] was chosen to attempt to drive transcription of CPEC-assembled infectious cDNA in insect cells. The UTR-linker fragment as described in [6] was modified to replace the existing CMV promoter with either the complete OpIE2 promoter (SEQ ID NO:15) or a truncated version lacking the 23 nucleotides comprising the promoter 3′ tail downstream of the transcription start site (OpIE2-CA; SEQ ID NO:16) (FIG. 5). The modified OpIE2 UTR-linker was assembled by CPEC with cDNA fragments from WNV_{KUN} and directly transfected into C6/36 cells. A TCID₅₀ of recovered infectious virus following transfection of WNV_{KUN} CPEC constructs into C6/36 cells indicated that passage 0 (P₀) titres were approximately 100-fold higher when using the OpIE2-CA (10^{5.42} IU/mL) rather than the OpIE2 (10^{3.35} IU/mL) promoter (FIG. 5).

### Example 3. Generation of Flavivirus DNA Constructs Using Circular Polymerase Extension Cloning

[0494] The modified OpIE2-CA UTR-linker fragment was selected for generating a vector driving PaRV infectious cDNA, by CPEC, set forth SEQ ID NO:37 (see the schematic in FIG. 6). Primers used for constructing the PaRV CPEC vector were designed to anneal at the junctions between viral genes (FIG. 6; Table 1). CPEC-derived PaRV (PaRV_{CPEC}) was successfully recovered from two independent transfection experiments into C6/36 cells, and the authenticity of the virus confirmed by sequencing upstream of the E protein. P₀ PaRV_{CPEC} supernatant was re-inoculated on to fresh C6/36 cells, and detected using anti-PaRV mouse serum [7] in IFA 3 days post-transfection to show successful replication of live PaRV_{CPEC} (FIG. 6).

[0495] Similarly, CPEC vectors designed to drive infectious BgV (SEQ ID NO:34); BinJV (SEQ ID NO:35); and PCV (SEQ ID NO:36) were produced. The primers for producing these respective vectors using CPEC are set forth in Table 1.

### Example 4. CPEC-Derived Viruses are Phenotypically the Same as Wild Type Viruses

[0496] PaRV_{CPEC} was assessed by two methods to confirm that it was phenotypically the same as PaRV_{WT}. In a growth kinetics assay, PaRV_{CPEC} displayed an identical growth profile to PaRV_{WT}, with no significant difference in the titres at any time point (two-way ANOVA). PaRV_{CPEC} and PaRV_{WT} replicated rapidly in the first 24 hrs (PaRV_{CPEC} 10^{5.78}/mL; PaRV_{WT} 10^{5.86}/mL), reaching a peak titre at 72 hrs (PaRV_{CPEC} 10^{7.72}/mL; PaRV_{WT} 10^{7.91}/mL), after which the virus titre plateaued (FIG. 3a). Consistent with a previous study [7], the titre of PaRV at 24 hours was significantly higher than WNV_{KUN}, however at four days post-infection WNV_{KUN} (10^{5.86}/mL) produced a significantly (two-way ANOVA; P<0.001) higher titre of virus than both PaRV_{WT} (10^{7.39}/mL) and PaRV_{CPEC} (10^{7.63}/mL). Further antigenic analysis using a panel of monoclonal antibodies, that were reactive to PaRV prM or E proteins, similarly confirmed the antigenic conservation between of PaRV_{WT} and PaRV_{CPEC} (FIG. 8). Comparison of infectious virus derived from P0 transfections of either PaRV RNA or a PaRV CPEC reaction revealed relatively comparable titres of 10^{7.80}/mL and 10^{6.97}/mL, respectively after a 5 day incubation.

[0497] Similar assessment was conducted for PCV_{CPEC}. The growth kinetics of this virus are set forth in FIG. 58; with a peak titre of 10^{7.5}/ml observed at 48 hours. Furthermore, antigenic authenticity of the virus was confirmed using monoclonal antibodies, and nucleotide sequence was confirmed by sequencing.

[0498] Growth kinetics of BgV_{CPEC} and BinJV_{CPEC} were also assessed, with peak titres of 10⁷/ml and 10^{8.4}/ml observed, respectively.

### Example 5. Using CPEC to Bypass Viral Entry does not Overcome Host Restriction of PaRV in Either IFN Response-Competent or -Deficient Cells

[0499] There is recent evidence that the Aedes-associated ISF, Kamiti River virus, can enter and replicate in vertebrate cells in vitro in the absence of interferon regulatory factors [8]. We examined whether PaRV, another Aedes-associated ISF, could also replicate in IFN response-deficient (IFN-α/β receptor knockout, IFNAR′) mouse embryonic fibroblasts via inoculation with PaRV, or by bypassing viral entry through transfecting with a PaRV CPEC vector driven by a CMV promoter. An IFA of inoculated MEF cells showed that there was no observable replication of PaRV in either the WT or IFNAR^{-/-} MEFs (FIG. 9). In contrast, WNV_{KUN} replicated readily. A TCID₅₀ conducted on the supernatant from CPEC-transfected MEF cells indicated that no infectious PaRV was produced from either cell line, while titres of 8.5×10⁴ IU/mL and 3.5×10⁶ IU/mL were observed for WNV_{KUN} transfected WT and IFNAR^{-/-} MEF cells, respectively.

### Example 6. Chimeric ISF Vectors not Observed to Replicate Virus

[0500] Vectors as described in Example 3, but containing either the PaRV prME genes on a WNV_{KUN} genomic backbone (WNV_{KUN}/PaRV-prME; SEQ ID NO:31) or the WNV_{KUN} prME genes on a PaRV genomic backbone (PaRV/WNV_{KUN}-prME; SEQ ID NO:385) were designed. CPEC was performed and transfected into C6/36 cells. While replicates of simultaneously transfected WNV_{KUN} and PaRV_{CPEC} control constructs were positive for virus replication as determined by IFA 5 days post-transfection, neither WNV_{KUN}/PaRV-prME nor PaRV/WNV_{KUN}-prME replication was detected (FIG. 10). Passaging the P₀ supernatant of the cells transfected with the chimeric CPEC constructs also failed to show any replication. The results indicated a possible incompatibility of genes between PaRV and WNV_{KUN}.

[0501] A CPEC vector containing the prME genes from CFAV isolated from Australian Aedes aegypti mosquitoes on a WNV_{KUN} genomic backbone (WNV_{KUN}/CFAV-prME; SEQ ID NO:27) was also produced. IFA analysis on transfected C6/36 cells indicated limited viral RNA replication and protein expression (FIG. 10), however titration and passaging of P₀ supernatant indicated that no infectious virus was being produced.

### Example 7. Chimeric WNV/PCV Vector Capable of Replicating Virus

[0502] A further CPEC vector containing the prME genes of another Australian ISF, Palm Creek virus (PCV) [9], on a WNV_{KUN} genomic backbone (WNV_{KUN}/PCV-prME; SEQ ID NO:20) was also produced.

[0503] The WNV_{KUN}/PCV-prME vector successfully generated viable virus when transfected in C6/36 cells. IFA analysis of the chimeric WNV_{KUN}/PCV-prME virus revealed the detection of both the PCV E protein and WNV_{KUN} NS1 protein, but not the expression of PCV NS1 or WNV_{KUN} E proteins (FIG. 10), indicating that the correct chimeric virus was made. The authenticity of the WNV_{KUN}/PCV-prME chimera was further verified by sequencing the viral RNA isolated from passaged P₁ C6/36 supernatant.

### Example 8. Chimeric ISF Vectors

[0504] Guided by the results set forth in Example 7, preferred chimeric ISF vectors suitable for production using CPEC have been designed and tested, and also found to be capable of replicating virus:

[0505] PCV/WNV_{KUN}-prME (SEQ ID NO:11)

[0506] PCV/ZIKA-prME (SEQ ID NO:12);

[0507] PCV/DENV2-prME (SEQ ID NO:13);

[0508] BgV/WNV_{KUN}-prME (SEQ ID NO:14);

[0509] BinJV/WNV_{KUN}-prME (SEQ ID NO:388);

[0510] BinJV/ZIKV-prME (SEQ ID NO:390);

[0511] BinJV/DENV1-prME (SEQ ID NO:394);

[0512] PaRV/KRBV-prM (SEQ ID NO:398)

[0513] Primers used to produce a subset of the above vectors by CPEC are set forth in Table 1.

[0514] These chimeric ISF vectors were designed to replicate chimeric ISFs comprising immunogenic sequences in the form of prME or prM proteins encoded by the genome of a flaviviruse that is not insect-specific; and C and NS1-NS5 proteins encoded by the genome of an insect-specific flavivirus that is capable of infecting a plurality of types of insect cells.

[0515] By way of example, detail regarding the structural features of a subset of the above vectors is provided below. Similar information will be readily determinable for the remaining vectors by the skilled person, using standard bioinformatics tools in combination with the flavivirus sequences used for the chimeric ISF vectors, and the examples provided herein.

### PCV/WNV_{KUN}-prME

[0516] PCV/WNV_{KUN}-prME vector is designed to replicate a chimeric ISF containing prME from WNV, and the remaining flavivirus proteins (C and NS1-NS5) from PCV. Nucleotide sequence of the vector is set forth in SEQ ID NO:11, with reference to FIG. 22. Key features of the vector are as follows:

[0517] OpIE2-CA promoter: nucleotides 427-958

[0518] 5′UTR from PCV: nucleotides 959-1056

[0519] Region encoding C protein from PCV: nucleotides 1057-1464

[0520] Region encoding prM protein from KUNV: nucleotides 1465-1965

[0521] Region encoding E protein from KUNV: nucleotides 1966-3468

[0522] Region encoding NS1 protein from PCV: nucleotides 3469-4624

[0523] Region encoding NS2A protein from PCV: nucleotides 4625-5352

[0524] Region encoding NS2B protein from PCV: nucleotides 5353-5733

[0525] Region encoding NS3 protein from PCV: nucleotides 5734-7494

[0526] Region encoding NS4A protein from PCV: nucleotides 7495-8010

[0527] Region encoding NS4B protein from PCV: nucleotides 8011-8769

[0528] Region encoding NS5 protein from PCV: nucleotides 8770-11436

[0529] 3′UTR from PCV: nucleotides 11437-11978

[0530] When transfected in C6/36 cells, this vector produced chimeric insect-specific flavivirus at a titre of 1.7×10⁶/ml.

### PCV/ZIKA-prME

[0531] PCV/ZIKA-prME vector is designed to replicate a chimeric ISF containing prME from ZIKA, and the remaining flavivirus proteins (C and NS1-NS5) from PCV. Nucleotide sequence of the vector is set forth in SEQ ID NO:12, with reference to FIG. 23. Key features of the vector are as follows:

[0532] OpIE2-CA promoter: nucleotides 427-958

[0533] 5′UTR from PCV: nucleotides 959-1056

[0534] Region encoding C protein from PCV: nucleotides 1057-1464

[0535] Region encoding prM protein from ZIKA: nucleotides 1465-1968

[0536] Region encoding E protein from ZIKA: nucleotides 1969-3480

[0537] Region encoding NS1 protein from PCV: nucleotides 3481-4636

[0538] Region encoding NS2A protein from PCV: nucleotides 4637-5364

[0539] Region encoding NS2B protein from PCV: nucleotides 5365-5745

[0540] Region encoding NS3 protein from PCV: nucleotides 5746-7506

[0541] Region encoding NS4A protein from PCV: nucleotides 7507-8022

[0542] Region encoding NS4B protein from PCV: nucleotides 8023-8781

[0543] Region encoding NS5 protein from PCV: nucleotides 8782-11448

[0544] 3′UTR from PCV: nucleotides 11449-11990

[0545] When transfected in C6/36 cells, this vector produced chimeric insect specific flavivirus at a titre of 3.9×10⁷/ml.

### PCV/DENV2-prME

[0546] PCV/DENV2-prME vector is designed to replicate a chimeric ISF containing prME from DENV2, and the remaining flavivirus proteins (C and NS1-NS5) from PCV. Nucleotide sequence of the vector is set forth in SEQ ID NO:13, with reference to FIG. 24. Key features of the vector are as follows:

[0547] OpIE2-CA promoter: nucleotides 427-958

[0548] 5′UTR from PCV: nucleotides 959-1056

[0549] Region encoding C protein from PCV: nucleotides 1057-1464

[0550] Region encoding prM protein from DENV2: nucleotides 1465-1962

[0551] Region encoding E protein from DENV2: nucleotides 1963-3447

[0552] Region encoding NS1 protein from PCV: nucleotides 3448-4603

[0553] Region encoding NS2A protein from PCV: nucleotides 4604-5331

[0554] Region encoding NS2B protein from PCV: nucleotides 5332-5712

[0555] Region encoding NS3 protein from PCV: nucleotides 5713-7473

[0556] Region encoding NS4A protein from PCV: nucleotides 7474-7989

[0557] Region encoding NS4B protein from PCV: nucleotides 7990-8748

[0558] Region encoding NS5 protein from PCV: nucleotides 8749-11415

[0559] 3′UTR from PCV: nucleotides 11416-11957

[0560] When transfected in C6/36 cells, this vector produced chimeric insect-specific flavivirus at a titre of 3.6×10⁵/ml.

### BgV/WNV_{KUN}-prME

[0561] BgV/WNV_{KUN}-prME vector is designed to replicate a chimeric ISF containing prME from KUNV, and the remaining flavivirus proteins (C and NS1-NS5) from BgV. Nucleotide sequence of the vector is set forth in SEQ ID NO:14, with reference to FIG. 25. Key features of the vector are as follows:

[0562] OpIE2-CA promoter: nucleotides 427-958

[0563] 5′UTR from BgV: nucleotides 959-1074

[0564] Region encoding C protein from BgV: nucleotides 1075-1416

[0565] Region encoding prM protein from KUNV: nucleotides 1417-1917

[0566] Region encoding E protein from KUNV: nucleotides 1918-3420

[0567] Region encoding NS1 protein from BgV: nucleotides 3421-4476

[0568] Region encoding NS2A protein from BgV: nucleotides 4477-5151

[0569] Region encoding NS2B protein from BgV: nucleotides 5152-5541

[0570] Region encoding NS3 protein from BgV: nucleotides 5542-7407

[0571] Region encoding NS4A protein from BgV: nucleotides 7408-7785

[0572] Region encoding 2K protein from BgV: nucleotides 7786-7854

[0573] Region encoding NS4B protein from BgV: nucleotides 7855-8595

[0574] Region encoding NS5 protein from BgV: nucleotides 8596-11310

[0575] 3′UTR from PCV: nucleotides 11311-11830

[0576] When transfected in C6/36 cells, this vector produced chimeric insect-specific flavivirus at a titre of 10⁸¹⁵ infectious units/ml.

### Example 9. Further Chimeric ISF Vectors

[0577] The following further chimeric ISF vectors suitable for production using CPEC were designed:

[0578] WNV_{KUN}/BgV-prME (SEQ ID NO:23);

[0579] WNV_{KUN}/BinJV-prME (SEQ ID NO:25); and

[0580] WNV_{KUN}/KRBV-prME (SEQ ID NO:29).

[0581] Primers used to produce the above vectors by CPEC are set forth in Table 1.

[0582] These chimeric ISF vectors are designed to replicate chimeric ISFs comprising immunogenic sequences in the form of C and NS1-NS5 proteins encoded by the genome of a flaviviruse that is not insect-specific, and prME proteins encoded by the genome of an insect-specific flavivirus.

[0583] The key regions of these respective vectors are similar as set forth in Example 8, and can readily be discerned by the skilled person, e.g. using suitable bioinformatics tools.

### Example 10. Increasing the Specificity of Diagnostic Antigens Using ISF-VIF_{EDIII} and ISF—VIF_{prM} Chimeras

[0584] Diagnosing flavivirus infection is notoriously difficult due to the cross-reactivity of antibodies to the conserved immuno-dominant antigenic epitopes in the fusion loop of domain II of the E protein. This is a substantial issue for serologically differentiating between ZIKV and DENY infections. However, it has been shown that the E protein domain III subunit (EDIII) can confer diagnostic specificity for differentiating antibody responses to closely related flaviviruses such as WNV, Murray Valley encephalitis virus (MVEV), JEV and St Louis encephalitis virus. Furthermore, recent analysis of the human antibody response to Zika or dengue revealed that 90% of EDIII-reactive antibodies are specific to the infecting virus making EDIII a prime candidate for Zika diagnostics. The flavivirus prM protein similarly confers diagnostic specificity and has been shown to differentiate between antibody responses to DENY and JEV and between WNV and MVEV.

[0585] It has been recognised for this invention that chimeric insect-specific flaviviruses as described herein which feature particular immunogenic E protein domains and/or prM proteins may offer substantial advantages in regard to specificity of antibody binding. In particular, it is considered that chimeric insect-specific flaviviruses wherein the EDIII domain is of or derived from a vertebrate infecting flavivirus (VIF), and the remainder of the E protein is of or derived from an insect-specific flavivirus (see, e.g., FIG. 61), may be particularly desirable in regard to the specificity of responses of antibodies produced against the VIF.

[0586] Notably, in experiments conducted for the invention, no cross-reactivity has been observed upon assessment of PCV, PaRV and BinJV proteins with extensive panels of mAbs specific to vertebrate E and prM proteins. This suggests that, where the immunogenic sequence of at least certain preferred isolated proteins or chimeric insect-specific flaviviruses as herein described is of or derived from a VIF that is highly specific for the VIF (e.g. the EDIII domain), the protein or chimeric insect-specific flaviviruses should show overall very high specificity in regard to binding of antibodies targeting the VIF.

[0587] Systematic assessment of the use of PCV, PaRV and BinJV E protein scaffolds for the expression of the EDIII domain of the E protein or prM of WNV, DENY and ZIKV E domain- and prM-specific chimeras is therefore to be conducted. Specificity of binding of antibodies to these chimeric proteins of the invention will be assessed using panels of well-characterised immune serum to WNV, DENY or ZIKV from naturally infected humans and animals. To further challenge the specificity of the proteins, immune sera to heterologous flavivirus infections will similarly be assessed, including that from MVEV and JEV virus-infected individuals. Highly specific binding of WNV, DENY, or ZIKV antibodies to the respective isolated proteins is anticipated.

[0588] An example of such an isolated protein (BinJV/WNV_{KUN}v-EDIII) that is to be assessed, comprising BinJV C, NS1-NS5, and prM amino acid sequence, and chimeric E protein amino acid sequence wherein the EDIII domain is of WNV and the remaining amino acid sequence is of BinJV, is set forth in SEQ ID NO:32. A CPEC vector encoding the BinJV/WNV_{KUNV}-EDIII protein is set forth in SEQ ID NO:33. Initial in silico analysis suggests that the BinJV E protein may be a particularly strong candidate for exchange of these regions with WNV, as has been performed in the BinJV/WNV_{KUNV}-EDIII protein. This is due to the presence of few deletions within the BinJV E protein amino acid sequence as compared to VIF E proteins, and high overall homology with VIF E proteins.

[0589] Isolated chimeric proteins such as BinJV/WNV_{KUNV}-EDIII that are confirmed to be bound by corresponding antibodies with high specificity, using the approach set out in this example, will be considered particularly desirable for diagnostic applications as described herein.

### Example 11. Lilly Creek Virus

[0590] A new virus has been discovered for the purposes of this invention that is related to BinJV, but is a distinct species. The virus has been named ‘Lilly Creek virus’ (abbreviated herein as LiCV or LLCFV), and shares 90.8% amino acid identity and 76.3% nucleotide identity across the ORF with BinJV (FIG. 74). Phylogenetically, BinJV and LiCV branch together (FIG. 76). Accordingly, LiCV is considered a Lineage II ISF. The genomic sequence of LiCV is set forth in SEQ ID NO:386 (FIG. 62). The amino acid sequence of the ORF of LiCV is set forth in SEQ ID NO:387 (FIG. 63).

[0591] It has been determined for the invention that LiCV displays an insect-specific phenotype substantially the same as BinJV, with no replication detected in vertebrate cells (FIG. 77).

[0592] LiCV sequence is considered desirable for the purpose of producing chimeric ISF vectors similar to those herein described. It is noted that, despite overall high similarity, differences in the amino acid sequences between BinJV and LiCV may make one or the other better for chimerisation with VIFs, particularly for the production of envelope protein domain chimeras. As set out in FIG. 78, across the envelope protein, BinJV and LiCV display differences in homology with VIF envelope protein sequences.

### Example 12. Growth Kinetics of BinJV and Associated ISF Chimeras

[0593] A comparative assessment of growth of BinJV virus and associated chimeric ISF vectors (BinJV/WNV-prME; BinJV/ZIKV-prME, and BinJV/WNV-EDI) with PCV and an associated chimeric ISF vector (PCV/WNV_{KUN}-prME) was performed. For this assessment, similar as hereinabove described C6/36 mosquito cell cultures were inoculated with the wild type ISF viruses or chimeric viruses and harvested 5-7 days post-infection. The infectious virus titre of the resulting stock was determined by titration onto mosquito cells.

[0594] Results are set forth in FIG. 79. The growth of BinJV and associated chimeras was higher than PCV and associated chimeras. It will be appreciated that, in some circumstances BinJV chimeric ISF constructs may be especially preferred for optimal or greater yield of virus particles, although without limitation thereto.

### Example 13. Host Restriction Analysis of BinJV

[0595] An assessment of the ability of BinJV to infect and replicate in various vertebrate cell lines (including those with defective interferon response: MEF IFNAR^{-/-}), and mosquito cell lines (including those of Culex, Aedes and Anopheles origin) was undertaken. The results are set forth in FIG. 80, and demonstrate that BinJV cannot infect or replicate in vertebrate cells to any substantial extent, but can successfully infect and replicate in a range of mosquito cells.

[0596] In view of this data, use of BinJV for chimeric ISF vectors as described herein may be particularly desirable in at least some circumstances, e.g. from a safety perspective such as in the context of diagnostics and/or vaccines, and/or from a flexibility perspective with respect to suitable insect cells for use in replication of the chimeric ISFs.

### Example 14. Host Restriction Analysis of Chimeric ISF at Lowered Temperature

[0597] In certain cases, viral replication can be restricted in a particular cell at 37° C., but replication can occur at lower temperatures (e.g. 34° C.). To explore this in the context of the chimeric ISFs described herein, assessment of an exemplary chimeric ISF (BinJV/WNV_{KUN}-prME) was performed at 37° C. and 34° C. in a range of mammalian cell lines. Wild type BinJV and WNV_{KUN} virus was included as a control, as were mosquito cells (RNAi-deficient C6/36 Aedes cells).

[0598] Results are set forth in FIG. 81. It will be evident from these results that the exemplary chimeric ISF assessed cannot replicate in mammalian cells, even under conditions of lowered temperature. This indicates that chimeric ISFs as described herein may be particularly desirable from a safety perspective, e.g. in the context of use as diagnostics and/or vaccines.

### Example 15. Mutation of EDII Fusion Loop

[0599] BinJV and LiCV lack an immunodominant residue in its EDII fusion loop (G106V). Only two other linage II ISFs discovered to date similarly lack this residue. The significance of this is that this change in residue results in significantly less cross-reactivity for diagnostic applications. A number of monoclonal antibodies specific to the G106 phenotype are available, of which mAb 4G2 is an example. Due to the G106V substitution that naturally occurs in BinJV, mAb 4G2 does not bind. For the purposes of this invention the BinJV EDII fusion loop has been successfully manipulated to G106 to prove that manipulation of this region is possible, e.g. in other ISFs. IFA analysis using anti-flavivirus NS1 mAb 4G4 and anti-flavivirus E mAb 4G2 was then performed. Results are set forth in FIG. 83.

### Example 16. Domain I Chimeras

[0600] It has previously been shown that a 19 amino acid peptide in domain I of West Nile virus E protein can be used for diagnostic applications (Hobson-Peters et al., 2008, J Gen Virol). However, this 19 amino acid peptide is not typically present in ISF E proteins. For the purposes of this invention, domain I of BinJV has been mutated to express this 19 amino acid peptide. The presence of the domain I peptide was confirmed by binding of a specific antibody, and the BinJV/WNV_{EDI} chimera replicated to high titres (>10⁸/ml), as set forth in FIG. 84. This confirms that E protein domains can be exchanged between vertebrate infecting flaviviruses and ISFs.

### Example 17. PCV-Based Chimeric ISFs

[0601] As herein described, various chimeric ISF including PCV sequence and sequence from vertebrate-infecting flaviruses (VIFs) have been produced. Replication of PCV/WNV_{KUN}-prME, pCV/DENV-prME, and PCV/ZIKV-prME in mosquito cells, and comparison with replication of the corresponding wild type ISF and VSF has been assessed. Results are presented in FIG. 85.

### Example 18. Effect of Passaging on Chimeric ISFs

[0602] The effect of serially passaging chimeric ISFs as described herein through mosquito cells has been assessed. Specifically, PCV/ZIKV-prME and PCV/WNV_{KUN}-prME were passaged serially blind through C6/36 cells. Chimeric ISFs exposed to one passage (P1) (SEQ ID NO:400) and ten passages (P10) (SEQ ID NO:401) were then sequenced and compared Additionally, the growth kinetics of replication of wild type PCV, and P1 and P10 chimeric ISFs in C6/36 cells was compared (FIG. 86)

[0603] Based on sequence comparison, the P10 of PCV/ZIKV-prME featured certain genetic changes compared to the P1 of this chimera. Furthermore, replication of the P10 chimeric ISFs was found to be elevated, relative to the P1 ISFs. Without being bound by theory it is considered that genetic changes that occurred during serial passaging resulted in optimisation of replication of the chimeric ISFs in insect cells.

### Example 19. Antigenic Authenticity of Chimeric ISFs

[0604] For this example, PCV/WNV_{KUN}-prME, BinJV/WNV_{KUN}-prME, PCV/ZIKV-prME and BinJV/ZIKV-prME chimeras were presented either as purified virions coated onto microwell plates, or as fixed antigens in infected C6/36 mosquito cell monolayers. The antigens were probed with monoclonal antibodies specific to individual domains of WNV or ZIKV envelope protein (EDI, EDII, EDIII), prM or quaternary structures of prM and E. The successful binding of these mAbs to the chimeric viruses confirmed their antigenic authenticity. The absence of WNV and ZIKV NS1 (which is not part of the chimeric constructs) was confirmed by assessing with NS1-specific mAbs. Results are set forth in Tables 2 and 3.

### Example 20. Recognition of Chimeric ISFs by Human and Animal Sera

[0605] Utility of ISF chimeric viral antigens in diagnostic assays was assessed by study of the binding of immune human, horse and crocodile sera to chimeric ISFs in fixed cell ELISA using virus-infected C6/36 mosquito cell monolayers. Specifically, binding WNV-immune sera to PCV/WNV_{KUN}-prME was assessed. As controls, negative human sera and virus-specific monoclonal antibodies were included, as well as wild type PCV and WNV. As set forth in FIG. 87, there was negligible reactivity of naïve sera. In contrast, substantial reactivity of WNV-immune sera with PCV/WNV_{KUN}-prME and wild type WNV occurred. Control reactions were essentially as expected.

[0606] Similarly, binding of PCV/ZIKV-prME with ZIKV-immune human sera was assessed in ELISA, as set forth in FIG. 88. Purified PCV/ZIKV-prME virions were coated onto 96-well ELISA microwell plates and probed with human serum at a dilution of 1/320. Bound human antibodies were detected with a HRP-conjugated anti-human Ig. The OD of similarly diluted serum on mock-coated wells was subtracted. The ZIKV positive human serum bound PCV/ZIKV-prME virions strongly, while there was negligible reactivity of a ZIKV-naïve serum.

### Example 21. Assessment of Cross-Reactivity of BinJV E Proteins in Chimeric ISFs

[0607] As set forth in FIG. 93, lysates of BinJV or KUNV-infected cells were coated onto ELISA plates at a pre-determined dilution (1/1000) giving the maximum level of E protein binding for both viruses. Comparable amounts of viral antigen were confirmed by the similar binding of anti-NS1 mAb 4G4 and anti-E mAb (4G2 for KUNV and 3A3 for BinJV). WNV-immune horse sera clearly reacted to KUNV lysate (blue bars), while there was negligible reactivity of these sera to BinJV. WNV positive horse sera (experimentally infected with WNV)=JPA8, 46, 12, 17, 32. WNV-naïve horse sera=neg 1, neg 2. Binding of sera to mock lysate subtracted from all readings. These results demonstrate that BinJV E proteins have minimal cross-reactivity when probed with immune sera, indicating that they may make ideal scaffolds for the preparation of E subdomain chimeras.

### Example 22. Chimeric ISFs as Vaccines

[0608] As set forth in FIG. 89, WNV-immune human, horse, crocodile, and rabbit sera neutralizes PCV/WNV_{KUN}-prME and BinJV/WNV_{KUN}-prME with similar efficiency to WNV. Similar findings were observed for PCV/ZIKV-prME as compared with ZIKV (FIG. 90). This is strong evidence that insect specific flavivirus (ISF)/vertebrate infecting flavivirus (VIF) chimeras are antigenically authentic and can induce robust VIF-neutralising responses.

[0609] It has also been demonstrated that immunization of mice with purified BinJV particles (2 doses of 10-20 ug of purified particle+Advax) induces a potent neutralising response (titre of 640). This strategy should also be effective using chimeric ISF particles.

### Example 23. Codon Optimisation

[0610] Insects and mammals have evolved different protein encoding strategies (codon pair bias). There is evidence that ISFs have optimised their codon pair bias to be more similar to that of insects (Colmant et al. (2017) mSphere 2(4) pii: e00262-17). In contrast, it appears that VIFs like WNV, ZIKV, and DENY ‘balance’ their codon optimisation between insects and mammals Codon optimisation of the VIF prME sequences that have been inserted into chimeric ISF vectors as described herein will be optimised to an insect-like codon pair bias, with the intention of enabling the chimeric ISFs to replicate more efficiently in insect cells, and/or supress their replication in vertebrate cells. As proof of concept for this approach, when the genomes of dengue viruses were recoded to an insect-like codon pair bias, they grew well in insect cells but became highly attenuated in mammalian cells (Shen et al., 2015, PNAS, 112; 4749-4754). Thus, the proposed codon optimisation approach may provide an additional safety mechanism for chimeric ISF applications, and/or improve growth in mosquito cell cultures for scale-up production purposes.

### Example 24. Restriction of Unwanted Replication Using miRNA

[0611] It has been realised for the invention that it may be possible to provide a further safety measure for use of chimeric ISFs as described herein, e.g., in the context of use as vaccine for vertebrate viruses, using an small RNA (e.g. miRNA)-based approach. Specifically, with reference to Teterina et al., 2014, Virology, 456; 247-258 and Zhou et al., 2014, Parasites & Vectors, 7; 488, it is possible to modulate replication of flaviviruses in specific cells or tissues by incorporating target sequence of regulatory miRNA into the flavivirus sequence.

[0612] Accordingly, an approach will be explored wherein target miRNA sequence is incorporated into chimeric ISFs as described herein, to constrain or prevent replication of the chimeric ISF in the mosquito midgut. It will be appreciated that, in the unlikely event that a chimeric ISF was transferred from a vertebrate subject (e.g. after vaccination with the chimeric ISF) to a mosquito by feeding by the mosquito on the subject, the inclusion of such an miRNA target sequence could prevent or constrain replication of the chimeric ISF in the mosquito.

[0613] Throughout the specification, the aim has been to describe the preferred embodiments of the invention without limiting the invention to any one embodiment or specific collection of features. Various changes and modifications may be made to the embodiments described and illustrated without departing from the present invention.

[0614] The disclosure of each patent and scientific document, computer program and algorithm referred to in this specification is incorporated by reference in its entirety.

### Tables

TABLE 1
Primers used for CPEC amplification to produce chimeric insect-specific flavivirus vectors.

| | | | | SEQ |
|---|---|---|---|---|
| Sequence Name | Name | Direction | Sequence | ID NO |
| BgV/WNV-prME [CA] | BgV10722R | reverse | GATTCTTGTCGTTTCTCG | 48 |
| BgV/WNV-prME [CA] | BgV10613F | forward | CACACACGGATCACATTGACACC | 49 |
| BgV/WNV-prME [CA] | BgNS5_R | reverse | GTGCTTTAATTTATATCAAG | 50 |
| BgV/WNV-prME [CA] | Bg3′UTR_F | forward | CTTGATATAAATTAAAGCAC | 51 |
| BgV/WNV-prME [CA] | BgNS5-30_R | reverse | GGTTGGTTTAATGGAGTGCTTTAATTTATATCAAGCAGCC | 52 |
| | | | AATTTCGGAGTGTTCC | |
| BgV/WNV-prME [CA] | BgV9649F | forward | GCTCCCACCATTTCCACCATTTGC | 53 |
| BgV/WNV-prME [CA] | BgNS4B_R | reverse | CTCACCACCTCCTCTTTTGGG | 54 |
| BgV/WNV-prME [CA] | BgNS5_F | forward | CCCAAAAGAGGAGGTGGTGAG | 55 |
| BgV/WNV-prME [CA] | BgNS4B-30_R | reverse | GCCAAGGGTCATGGTCTCACCACCTCCTCTTTTGGGGTTT | 56 |
| | | | TGCAATATCC | |
| BgV/WNV-prME [CA] | BgNS5-30_F | forward | GGATATTGCAAAACCCCAAAAGAGGAGGTGGTGAGACCA | 57 |
| | | | TGACCCTTGGC | |
| BgV/WNV-prME [CA] | BgNS2B_R | reverse | CAAAACTCCACTGCGCTGGC | 58 |
| BgV/WNV-prME [CA] | BgNS3_F | forward | GCCAGCGCAGTGGAGTTTTG | 59 |
| BgV/WNV-prME [CA] | BgVNS2B-30_R | reverse | GGCACGTCCCACAAAACTCCACTGCGCTGGCTTTTGCCTG | 60 |
| | | | C | |
| BgV/WNV-prME [CA] | BgNS2B-30_R | reverse | GGCACGTCCCACAAAACTCCACTGCGCTGGCTTTTGCCTG | 61 |
| | | | C | |
| BgV/WNV-prME [CA] | BgVNS3-30_F | forward | GCAGGCAAAAGCCAGCGCAGTGGAGTTTTGTGGGACGTG | 62 |
| | | | CC | |
| BgV/WNV-prME [CA] | BgV-NS2A_F | forward | GGTGACGGGATGGAAAATGG | 63 |
| BgV/WNV-prME [CA] | BgV-NS1_R | reverse | GGCACTTACCCATGAAGTGACC | 64 |
| BgV/WNV-prME [CA] | KE/BNS1_R | reverse | GAGCAACCGTACTCAGCATGCACGTTCACGG | 65 |
| BgV/WNV-prME [CA] | KE/BNS1_F | forward | CCGTGAACGTGCATGCTGAGTACGGTTGCTC | 66 |
| BgV/WNV-prME [CA] | KUN-E-Seq-F | forward | GCATGGACCAACTACCG | 67 |
| BgV/WNV-prME [CA] | KUNV-C-prM_R | reverse | GGAAATCTCTGTTGCTCATTCCAAGACAG | 68 |
| BgV/WNV-prME [CA] | KUNV-E_F | forward | CTGTCTTGGAATGAGCAACAGAGATTTCC | 69 |
| BgV/WNV-prME [CA] | BC/KPr_F | forward | GCAACAACATGGGCCGTCACTCTCTCCAAC | 70 |
| BgV/WNV-prME [CA] | BgV-92F | forward | GCACACTAGTTTGTGACATAAGGC | 71 |
| BgV/WNV-prME [CA] | BgV-103F | forward | CGCTTGTTTTGGCACACTAG | 72 |
| BgV/WNV-prME [CA] | BgV10739R | reverse | GCGTACGGATTTTACG | 73 |
| BgV/WNV-prME [CA] | BgV-116Fs | forward | CGTAAAATCCGTACGC | 74 |
| BgV/WNV-prME [CA] | BgV-5UTR-CA-2R | reverse | GTACGGATTTTACGGTTTACCAGATCG | 75 |
| BgV/WNV-prME [CA] | BgV-5UTR-CA-2F | forward | CGATCTGGTAAACCGTAAAATCCGTAC | 76 |
| BgV/WNV-prME [CA] | pUC19-R | reverse | TGGATGGCCTTCCCCATTAT | 77 |
| BgV/WNV-prME [CA] | OplE2-F | forward | CATTATAAGCTGCAATAAACAAGTT | 78 |
| BgV/WNV-prME [CA] | DNA Linker-F | forward | GGGTCGGCATGGCATCTCC | 79 |
| BinJV/WNV-EDIII [CA] | BinJV_NS5-3′_R | reverse | TGCCATGCCGACCCAGATACTTGATGTTTC | 80 |
| BinJV/WNV-EDIII [CA] | BinJV3′UTR- | reverse | TGCCATGCCGACCCAGATACTTGATGTTTC | 81 |
| | linker | | | |
| BinJV/WNV-EDIII [CA] | BinJV_NS5- | forward | GGCAATGTGATCTAAGGATCTACGAACGAG | 82 |
| | 3′Junc_F | | | |
| BinJV/WNV-EDIII [CA] | BinJV_NS5- | reverse | CTCGTTCGTAGATCCTTAGATCACATTGCC | 83 |
| | 3′Junc_R | | | |
| BinJV/WNV-EDIII [CA] | BinJV_NS5-3′_F | forward | GGAGTTCCTAGGAGGGGATTACAGGCCACC | 84 |
| BinJV/WNV-EDIII [CA] | BinJV_3-4B_R | reverse | GGTGGCCTGTAATCCCCTCCTAGGAACTCC | 85 |
| BinJV/WNV-EDIII [CA] | BinJV_3-4B_F | forward | AAATCAAACAAGCGGGGGACTGTGTTGTGG | 86 |
| BinJV/WNV-EDIII [CA] | BinJV_1-2B_R | reverse | CCACAACACAGTCCCCCGCTTGTTTGATTT | 87 |
| BinJV/WNV-EDIII [CA] | BinJV_1-2B_F | forward | GTGACCGTGGGTGCCCTATCGGAAATAGGA | 88 |
| BinJV/WNV-EDIII [CA] | BinJV_5′-E_R | reverse | TCCTATTTCCGATAGGGCACCCACGGTCAC | 89 |
| BinJV/WNV-EDIII [CA] | BinJV-E_F | forward | GCTCCGTCATATGGTAACCAATGCCTGGAT | 90 |
| BinJV/WNV-EDIII [CA] | BinJV-M_R | reverse | ATCCAGGCATTGGTTACCATATGACGGAGC | 91 |
| BinJV/WNV-EDIII [CA] | BinJV_5′-E_F | forward | AACGATCTGGTAAACAGTATATTTTGCGTG | 92 |
| BinJV/WNV-EDIII [CA] | Linker- | reverse | CACGCAAAATATACTGTTTACCAGATCGTT | 93 |
| | BinJV5′UTR | | | |
| BinJV/WNV-EDIII [CA] | pUC19-R | reverse | TGGATGGCCTTCCCCATTAT | 94 |
| BinJV/WNV-EDIII [CA] | OplE2-F | forward | CATTATAAGCTGCAATAAACAAGTT | 95 |
| BinJV/WNV-EDIII [CA] | DNA Linker-F | forward | GGGTCGGCATGGCATCTCC | 96 |
| WNV/BgV-prME [CA] | KUNV-3′UTR_R | reverse | TCCTGTGTTCTCGCACCAC | 97 |
| WNV/BgV-prME [CA] | KUNV-UTRlinker_F | forward | GTGGTGCGAGAACACAGGA | 98 |
| WNV/BgV-prME [CA] | KUN-NS5(only)-R | reverse | TTACAATACTGTATCCTCAACCAATG | 99 |
| WNV/BgV-prME [CA] | KUNV-NS5_R | reverse | CTGTATCCTCAACCAATGTTGTGTCTTC | 100 |
| WNV/BgV-prME [CA] | KUNV-3′UTR_F | forward | GAAGACACAACATTGGTTGAGGATACAG | 101 |
| WNV/BgV-prME [CA] | KUN-NS5(only)-F | forward | GGTGGGGCAAAAGGAC | 102 |
| WNV/BgV-prME [CA] | KUNV-NS4B_R | reverse | CGTCCTTTTGCCCCACCTC | 103 |
| WNV/BgV-prME [CA] | KUNV-NS5_F | forward | GAGGTGGGGCAAAAGGACG | 104 |
| WNV/BgV-prME [CA] | KUNV-NS4A_R | reverse | CCCATCTCATTGGCTGCCAC | 105 |
| WNV/BgV-prME [CA] | KUNV-NS4B_F | forward | GTGGCAGCCAATGAGATGGG | 106 |
| WNV/BgV-prME [CA] | qWNns4A R | reverse | TAGCTGGTTGTCTGTCTGCG | 107 |
| WNV/BgV-prME [CA] | qWNns4A F | forward | TTGAGTGTGATGACCATGGGAG | 108 |
| WNV/BgV-prME [CA] | KUNV-NS3_R | reverse | GACCTCGATAAAACCTATTTGAGAGCGC | 109 |
| WNV/BgV-prME [CA] | KUNV-NS4A_F | forward | GCGCTCTCAAATAGGTTTTATCGAGGTC | 110 |
| WNV/BgV-prME [CA] | KUNV-NS2B_R | reverse | CTCCTCTCTTTGTGTATTGGAGAGTTATC | 111 |
| WNV/BgV-prME [CA] | KUNV-NS3_F | forward | GATAACTCTCCAATACACAAAGAGAGGAG | 112 |
| WNV/BgV-prME [CA] | KUNV-NS2A_R | reverse | CTTCAGTTGCAGGCCACCC | 113 |
| WNV/BgV-prME [CA] | KUNV-NS2B_F | forward | GGGTGGCCTGCAACTGAAG | 114 |
| WNV/BgV-prME [CA] | KUNV-NS1_R | reverse | GAAAAGGATCAATCATGTCAGCGTTGTAG | 115 |
| WNV/BgV-prME [CA] | KUNV-NS2A_F | forward | CTACAACGCTGACATGATTGATCCTTTTC | 116 |
| WNV/BgV-prME [CA] | KUN-NS1-INT_R | reverse | CGGTCCATCCAAGCTTCCAC | 117 |
| WNV/BgV-prME [CA] | BE/KNS1-15_R | reverse | GGCACATCCAGTATCAGCGTTAACTCCAAG | 118 |
| WNV/BgV-prME [CA] | BE/KNS1-15_F | forward | CTTGGAGTTAACGCTGATACTGGATGTGCC | 119 |
| WNV/BgV-prME [CA] | BE/KNS1_R | reverse | CCGACTTATATCTATGGCACATCCAGTATCAGCGTTAACT | 120 |
| | | | CCAAGTGTCATGAACAACAG | |
| WNV/BgV-prME [CA] | BE/KNS1_F | forward | CTGTTGTTCATGACACTTGGAGTTAACGCTGATACTGGAT | 121 |
| | | | GTGCCATAGATATAAGTCGG | |
| WNV/BgV-prME [CA] | K/B(S)-E-SEQ_F | forward | GATAGGTGTGAACTCCCGCAATG | 122 |
| WNV/BgV-prME [CA] | BgVE_F | forward | CCTGCTTACGGCTCTCACTGCATTG | 123 |
| WNV/BgV-prME [CA] | BgV-PrM_R | forward | GGCAATTGGACCTGCTTACG | 124 |
| WNV/BgV-prME [CA] | BgV531R | reverse | GCAATCAATGTCGTCAGGCTCTTCC | 125 |
| WNV/BgV-prME [CA] | K/B(S)-Pr-SEQ_R | reverse | CACCAGTATCCAGCATCATTGATG | 126 |
| WNV/BgV-prME [CA] | KC/BPr-15_R | reverse | CTTCCTGAGAGTTAATGCTCCCACGCCAG | 127 |
| WNV/BgV-prME [CA] | KC/BPr-15_F | forward | CTGGCGTGGGAGCATTAACTCTCAGGAAG | 128 |
| WNV/BgV-prME [CA] | KC/BPr_R | reverse | AATAGTGTTGTCAATCTTCCTGAGAGTTAATGCTCCCACG | 129 |
| | | | CCAGCAATCAAGCCAATCAT | |
| WNV/BgV-prME [CA] | KC/BPr_F | forward | ATGATTGGCTTGATTGCTGGCGTGGGAGCATTAACTCTCA | 130 |
| | | | GGAAGATTGACAACACTATT | |
| WNV/BgV-prME [CA] | K/B(S)-C-SEQ_F | forward | CAGAAGAAGAGAGGAGGAAAGACC | 131 |
| WNV/BgV-prME [CA] | KUNV-5′UTR_R | reverse | GGCCCTCCTGGTTTCTTAGAC | 132 |
| WNV/BgV-prME [CA] | KUNV-C-prM_F | forward | GTCTAAGAAACCAGGAGGGCC | 133 |
| WNV/BgV-prME [CA] | KUNV-UTRlinker_R | reverse | CAGCTCACACAGGCGAACTACT | 134 |
| WNV/BgV-prME [CA] | KUNV-5′UTR_F | forward | AGTAGTTCGCCTGTGTGAGCTG | 135 |
| WNV/BgV-prME [CA] | pUC19-R | reverse | TGGATGGCCTTCCCCATTAT | 136 |
| WNV/BgV-prME [CA] | OplE2-F | forward | CATTATAAGCTGCAATAAACAAGTT | 137 |
| WNV/BgV-prME [CA] | DNA Linker-F | forward | GGGTCGGCATGGCATCTCC | 138 |
| WNV/BinJV-prME [CA] | KUNV-3′UTR_R | reverse | TCCTGTGTTCTCGCACCAC | 139 |
| WNV/BinJV-prME [CA] | KUNV-UTRlinker_F | forward | GTGGTGCGAGAACACAGGA | 140 |
| WNV/BinJV-prME [CA] | KUN-NS5(only)-R | reverse | TTACAATACTGTATCCTCAACCAATG | 141 |
| WNV/BinJV-prME [CA] | KUNV-NS5_R | reverse | CTGTATCCTCAACCAATGTTGTGTCTTC | 142 |
| WNV/BinJV-prME [CA] | KUNV-3′UTR_F | forward | GAAGACACAACATTGGTTGAGGATACAG | 143 |
| WNV/BinJV-prME [CA] | KUN-NS5(only)-F | forward | GGTGGGGCAAAAGGAC | 144 |
| WNV/BinJV-prME [CA] | KUNV-NS4B_R | reverse | CGTCCTTTTGCCCCACCTC | 145 |
| WNV/BinJV-prME [CA] | KUNV-NS5_F | forward | GAGGTGGGGCAAAAGGACG | 146 |
| WNV/BinJV-prME [CA] | KUNV-NS4A_R | reverse | CCCATCTCATTGGCTGCCAC | 147 |
| WNV/BinJV-prME [CA] | KUNV-NS4B_F | forward | GTGGCAGCCAATGAGATGGG | 148 |
| WNV/BinJV-prME [CA] | qWNns4A R | reverse | TAGCTGGTTGTCTGTCTGCG | 149 |
| WNV/BinJV-prME [CA] | qWNns4A F | forward | TTGAGTGTGATGACCATGGGAG | 150 |
| WNV/BinJV-prME [CA] | KUNV-NS3_R | reverse | GACCTCGATAAAACCTATTTGAGAGCGC | 151 |
| WNV/BinJV-prME [CA] | KUNV-NS4A_F | forward | GCGCTCTCAAATAGGTTTTATCGAGGTC | 152 |
| WNV/BinJV-prME [CA] | KUNV-NS2B_R | reverse | CTCCTCTCTTTGTGTATTGGAGAGTTATC | 153 |
| WNV/BinJV-prME [CA] | KUNV-NS3_F | forward | GATAACTCTCCAATACACAAAGAGAGGAG | 154 |
| WNV/BinJV-prME [CA] | KUNV-NS2A_R | reverse | CTTCAGTTGCAGGCCACCC | 155 |
| WNV/BinJV-prME [CA] | KUNV-NS2B_F | forward | GGGTGGCCTGCAACTGAAG | 156 |
| WNV/BinJV-prME [CA] | KUNV-NS1_R | reverse | GAAAAGGATCAATCATGTCAGCGTTGTAG | 157 |
| WNV/BinJV-prME [CA] | KUNV-NS2A_F | forward | CTACAACGCTGACATGATTGATCCTTTTC | 158 |
| WNV/BinJV-prME [CA] | KUN-NS1-INT_R | reverse | CGGTCCATCCAAGCTTCCAC | 159 |
| WNV/BinJV-prME [CA] | BinE-KUN1R | reverse | GGCACATCCAGTATCGGCACCCACGGTCAC | 160 |
| WNV/BinJV-prME [CA] | BinE-KUN1F | forward | GTGACCGTGGGTGCCGATACTGGATGTGCC | 161 |
| WNV/BinJV-prME [CA] | BinJV-M_R | reverse | ATCCAGGCATTGGTTACCATATGACGGAGC | 162 |
| WNV/BinJV-prME [CA] | BinJV-E_F | forward | GCTCCGTCATATGGTAACCAATGCCTGGAT | 163 |
| WNV/BinJV-prME [CA] | KUNC-BinprR | reverse | GGCTATCGTGATTGCTGCTCCCACGCCAGC | 164 |
| WNV/BinJV-prME [CA] | KUNC-BinprF | forward | GCTGGCGTGGGAGCAGCAATCACGATAGCC | 165 |
| WNV/BinJV-prME [CA] | K/B(S)-C-SEQ_F | forward | CAGAAGAAGAGAGGAGGAAAGACC | 166 |
| WNV/BinJV-prME [CA] | KUNV-5′UTR_R | reverse | GGCCCTCCTGGTTTCTTAGAC | 167 |
| WNV/BinJV-prME [CA] | KUNV-C-prM_F | forward | GTCTAAGAAACCAGGAGGGCC | 168 |
| WNV/BinJV-prME [CA] | KUNV-UTRlinker_R | reverse | CAGCTCACACAGGCGAACTACT | 169 |
| WNV/BinJV-prME [CA] | KUNV-5′UTR_F | forward | AGTAGTTCGCCTGTGTGAGCTG | 170 |
| WNV/BinJV-prME [CA] | pUC19-R | reverse | TGGATGGCCTTCCCCATTAT | 171 |
| WNV/BinJV-prME [CA] | OplE2-F | forward | CATTATAAGCTGCAATAAACAAGTT | 172 |
| WNV/BinJV-prME [CA] | DNA Linker-F | forward | GGGTCGGCATGGCATCTCC | 173 |
| WNV/CFAV-prME [CA] | KUNV-3′UTR_R | reverse | TCCTGTGTTCTCGCACCAC | 174 |
| WNV/CFAV-prME [CA] | KUNV-UTRlinker_F | forward | GTGGTGCGAGAACACAGGA | 175 |
| WNV/CFAV-prME [CA] | KUN-NS5(only)-R | reverse | TTACAATACTGTATCCTCAACCAATG | 176 |
| WNV/CFAV-prME [CA] | KUNV-NS5_R | reverse | CTGTATCCTCAACCAATGTTGTGTCTTC | 177 |
| WNV/CFAV-prME [CA] | KUNV-3′UTR_F | forward | GAAGACACAACATTGGTTGAGGATACAG | 178 |
| WNV/CFAV-prME [CA] | KUN-NS5(only)-F | forward | GGTGGGGCAAAAGGAC | 179 |
| WNV/CFAV-prME [CA] | KUNV-NS4B_R | reverse | CGTCCTTTTGCCCCACCTC | 180 |
| WNV/CFAV-prME [CA] | KUNV-NS5_F | forward | GAGGTGGGGCAAAAGGACG | 181 |
| WNV/CFAV-prME [CA] | KUNV-NS4A_R | reverse | CCCATCTCATTGGCTGCCAC | 182 |
| WNV/CFAV-prME [CA] | KUNV-NS4B_F | forward | GTGGCAGCCAATGAGATGGG | 183 |
| WNV/CFAV-prME [CA] | qWNns4A R | reverse | TAGCTGGTTGTCTGTCTGCG | 184 |
| WNV/CFAV-prME [CA] | qWNns4A F | forward | TTGAGTGTGATGACCATGGGAG | 185 |
| WNV/CFAV-prME [CA] | KUNV-NS3_R | reverse | GACCTCGATAAAACCTATTTGAGAGCGC | 186 |
| WNV/CFAV-prME [CA] | KUNV-NS4A_F | forward | GCGCTCTCAAATAGGTTTTATCGAGGTC | 187 |
| WNV/CFAV-prME [CA] | KUNV-NS2B_R | reverse | CTCCTCTCTTTGTGTATTGGAGAGTTATC | 188 |
| WNV/CFAV-prME [CA] | KUNV-NS3_F | forward | GATAACTCTCCAATACACAAAGAGAGGAG | 189 |
| WNV/CFAV-prME [CA] | KUNV-NS2A_R | reverse | CTTCAGTTGCAGGCCACCC | 190 |
| WNV/CFAV-prME [CA] | KUNV-NS2B_F | forward | GGGTGGCCTGCAACTGAAG | 191 |
| WNV/CFAV-prME [CA] | KUNV-NS1_R | reverse | GAAAAGGATCAATCATGTCAGCGTTGTAG | 192 |
| WNV/CFAV-prME [CA] | KUNV-NS2A_F | forward | CTACAACGCTGACATGATTGATCCTTTTC | 193 |
| WNV/CFAV-prME [CA] | KUN-NS1-INT_R | reverse | CGGTCCATCCAAGCTTCCAC | 194 |
| WNV/CFAV-prME [CA] | CFAV-E/KUN-NS1_R | reverse | GGCACATCCAGTATCAGCCCGCACATAGTA | 195 |
| WNV/CFAV-prME [CA] | CFAV-E/KUN-NS1_F | forward | TACTATGTGCGGGCTGATACTGGATGTGCC | 196 |
| WNV/CFAV-prME [CA] | CFAV-Pr_R | reverse | AAACTCCCCCTTTACTGTGGTCCAAGTGCC | 197 |
| WNV/CFAV-prME [CA] | CFAV-E_F | forward | GGCACTTGGACCACAGTAAAGGGGGAGTTT | 198 |
| WNV/CFAV-prME [CA] | KUN-C/CFAV-Pr_R | reverse | CATGTCAATCACCACTGCTCCCACGCCAGC | 199 |
| WNV/CFAV-prME [CA] | KUN-C/CFAV-Pr_F | forward | GCTGGCGTGGGAGCAGTGGTGATTGACATG | 200 |
| WNV/CFAV-prME [CA] | K/B(S)-C-SEQ_F | forward | CAGAAGAAGAGAGGAGGAAAGACC | 201 |
| WNV/CFAV-prME [CA] | KUNV-5′UTR_R | reverse | GGCCCTCCTGGTTTCTTAGAC | 202 |
| WNV/CFAV-prME [CA] | KUNV-C-prM_F | forward | GTCTAAGAAACCAGGAGGGCC | 203 |
| WNV/CFAV-prME [CA] | KUNV-UTRlinker_R | reverse | CAGCTCACACAGGCGAACTACT | 204 |
| WNV/CFAV-prME [CA] | KUNV-5′UTR_F | forward | AGTAGTTCGCCTGTGTGAGCTG | 205 |
| WNV/CFAV-prME [CA] | pUC19-R | reverse | TGGATGGCCTTCCCCATTAT | 206 |
| WNV/CFAV-prME [CA] | OplE2-F | forward | CATTATAAGCTGCAATAAACAAGTT | 207 |
| WNV/CFAV-prME [CA] | DNA Linker-F | forward | GGGTCGGCATGGCATCTCC | 208 |
| WNV/KRBV-prME [CA] | KUNV-3′UTR_R | reverse | TCCTGTGTTCTCGCACCAC | 209 |
| WNV/KRBV-prME [CA] | KUNV-UTRlinker_F | forward | GTGGTGCGAGAACACAGGA | 210 |
| WNV/KRBV-prME [CA] | KUN-NS5(only)-R | reverse | TTACAATACTGTATCCTCAACCAATG | 211 |
| WNV/KRBV-prME [CA] | KUNV-NS5_R | reverse | CTGTATCCTCAACCAATGTTGTGTCTTC | 212 |
| WNV/KRBV-prME [CA] | KUNV-3′UTR_F | forward | GAAGACACAACATTGGTTGAGGATACAG | 213 |
| WNV/KRBV-prME [CA] | KUN-NS5(only)-F | forward | GGTGGGGCAAAAGGAC | 214 |
| WNV/KRBV-prME [CA] | KUNV-NS4B_R | reverse | CGTCCTTTTGCCCCACCTC | 215 |
| WNV/KRBV-prME [CA] | KUNV-NS5_F | forward | GAGGTGGGGCAAAAGGACG | 216 |
| WNV/KRBV-prME [CA] | KUNV-NS4A_R | reverse | CCCATCTCATTGGCTGCCAC | 217 |
| WNV/KRBV-prME [CA] | KUNV-NS4B_F | forward | GTGGCAGCCAATGAGATGGG | 218 |
| WNV/KRBV-prME [CA] | qWNns4A R | reverse | TAGCTGGTTGTCTGTCTGCG | 219 |
| WNV/KRBV-prME [CA] | qWNns4A F | forward | TTGAGTGTGATGACCATGGGAG | 220 |
| WNV/KRBV-prME [CA] | KUNV-NS3_R | reverse | GACCTCGATAAAACCTATTTGAGAGCGC | 221 |
| WNV/KRBV-prME [CA] | KUNV-NS4A_F | forward | GCGCTCTCAAATAGGTTTTATCGAGGTC | 222 |
| WNV/KRBV-prME [CA] | KUNV-NS2B_R | reverse | CTCCTCTCTTTGTGTATTGGAGAGTTATC | 223 |
| WNV/KRBV-prME [CA] | KUNV-NS3_F | forward | GATAACTCTCCAATACACAAAGAGAGGAG | 224 |
| WNV/KRBV-prME [CA] | KUNV-NS2A_R | reverse | CTTCAGTTGCAGGCCACCC | 225 |
| WNV/KRBV-prME [CA] | KUNV-NS2B_F | forward | GGGTGGCCTGCAACTGAAG | 226 |
| WNV/KRBV-prME [CA] | KUNV-NS1_R | reverse | GAAAAGGATCAATCATGTCAGCGTTGTAG | 227 |
| WNV/KRBV-prME [CA] | KUNV-NS2A_F | forward | CTACAACGCTGACATGATTGATCCTTTTC | 228 |
| WNV/KRBV-prME [CA] | KUN-NS1-INT_R | reverse | CGGTCCATCCAAGCTTCCAC | 229 |
| WNV/KRBV-prME [CA] | Kr-E/Ku-NS1_R | reverse | GGCACATCCAGTATCAGCTCGCACGTATGT | 230 |
| WNV/KRBV-prME [CA] | Kr-E/Ku-NS1_F | forward | ACATACGTGCGAGCTGATACTGGATGTGCC | 231 |
| WNV/KRBV-prME [CA] | Ku-C/Kr-E_R | reverse | TCCATTCATGGTCTTTGCTCCCACGCCAGC | 232 |
| WNV/KRBV-prME [CA] | Ku-C/Kr-E_F | forward | GCTGGCGTGGGAGCAAAGACCATGAATGGA | 233 |
| WNV/KRBV-prME [CA] | K/B(S)-C-SEQ_F | forward | CAGAAGAAGAGAGGAGGAAAGACC | 234 |
| WNV/KRBV-prME [CA] | KUNV-5′UTR_R | reverse | GGCCCTCCTGGTTTCTTAGAC | 235 |
| WNV/KRBV-prME [CA] | KUNV-C-prM_F | forward | GTCTAAGAAACCAGGAGGGCC | 236 |
| WNV/KRBV-prME [CA] | KUNV-UTRlinker_R | reverse | CAGCTCACACAGGCGAACTACT | 237 |
| WNV/KRBV-prME [CA] | KUNV-5′UTR_F | forward | AGTAGTTCGCCTGTGTGAGCTG | 238 |
| WNV/KRBV-prME [CA] | pUC19-R | reverse | TGGATGGCCTTCCCCATTAT | 239 |
| WNV/KRBV-prME [CA] | OplE2-F | forward | CATTATAAGCTGCAATAAACAAGTT | 240 |
| WNV/KRBV-prME [CA] | DNA Linker - F | forward | GGGTCGGCATGGCATCTCC | 241 |
| WNV/PaRV-prME [CA] | KUNV-3′UTR_R | reverse | TCCTGTGTTCTCGCACCAC | 242 |
| WNV/PaRV-prME [CA] | KUNV-UTRlinker_F | forward | GTGGTGCGAGAACACAGGA | 243 |
| WNV/PaRV-prME [CA] | KUN-NS5(only)-R | reverse | TTACAATACTGTATCCTCAACCAATG | 244 |
| WNV/PaRV-prME [CA] | KUNV-NS5_R | reverse | CTGTATCCTCAACCAATGTTGTGTCTTC | 245 |
| WNV/PaRV-prME [CA] | KUNV-3′UTR_F | forward | GAAGACACAACATTGGTTGAGGATACAG | 246 |
| WNV/PaRV-prME [CA] | KUN-NS5(only)-F | forward | GGTGGGGCAAAAGGAC | 247 |
| WNV/PaRV-prME [CA] | KUNV-NS4B_R | reverse | CGTCCTTTTGCCCCACCTC | 248 |
| WNV/PaRV-prME [CA] | KUNV-NS5_F | forward | GAGGTGGGGCAAAAGGACG | 249 |
| WNV/PaRV-prME [CA] | KUNV-NS4A_R | reverse | CCCATCTCATTGGCTGCCAC | 250 |
| WNV/PaRV-prME [CA] | KUNV-NS4B_F | forward | GTGGCAGCCAATGAGATGGG | 251 |
| WNV/PaRV-prME [CA] | qWNns4A R | reverse | TAGCTGGTTGTCTGTCTGCG | 252 |
| WNV/PaRV-prME [CA] | qWNns4A F | forward | TTGAGTGTGATGACCATGGGAG | 253 |
| WNV/PaRV-prME [CA] | KUNV-NS3_R | reverse | GACCTCGATAAAACCTATTTGAGAGCGC | 254 |
| WNV/PaRV-prME [CA] | KUNV-NS4A_F | forward | GCGCTCTCAAATAGGTTTTATCGAGGTC | 255 |
| WNV/PaRV-prME [CA] | KUNV-NS2B_R | reverse | CTCCTCTCTTTGTGTATTGGAGAGTTATC | 256 |
| WNV/PaRV-prME [CA] | KUNV-NS3_F | forward | GATAACTCTCCAATACACAAAGAGAGGAG | 257 |
| WNV/PaRV-prME [CA] | KUNV-NS2A_R | reverse | CTTCAGTTGCAGGCCACCC | 258 |
| WNV/PaRV-prME [CA] | KUNV-NS2B_F | forward | GGGTGGCCTGCAACTGAAG | 259 |
| WNV/PaRV-prME [CA] | KUNV-NS1_R | reverse | GAAAAGGATCAATCATGTCAGCGTTGTAG | 260 |
| WNV/PaRV-prME [CA] | KUNV-NS2A_F | forward | CTACAACGCTGACATGATTGATCCTTTTC | 261 |
| WNV/PaRV-prME [CA] | KUN-NS1-INT_R | reverse | CGGTCCATCCAAGCTTCCAC | 262 |
| WNV/PaRV-prME [CA] | PE/KNS1_R | reverse | CACATCCAGTATCAGCTCGGGTATAAG | 263 |
| WNV/PaRV-prME [CA] | PE/KNS1_F | forward | CTTATACCCGAGCTGATACTGGATGTG | 264 |
| WNV/PaRV-prME [CA] | PE/KNS1.2_R | reverse | CCGACTTATATCTATGGCACATCCAGTATCAGCTCGGGTA | 265 |
| | | | TAAGCGATTCCACAGAGGAT | |
| WNV/PaRV-prME [CA] | PE/KNS1.2_F | forward | ATCCTCTGTGGAATCGCTTATACCCGAGCTGATACTGGAT | 266 |
| | | | GTGCCATAGATATAAGTCGG | |
| WNV/PaRV-prME [CA] | SwV qE-R | reverse | AAACATCCGGTTCCCCATCC | 267 |
| WNV/PaRV-prME [CA] | SwV qE-F | forward | ATTCGACCGACATATGCCCC | 268 |
| WNV/PaRV-prME [CA] | PaRV-C-prM-R_R | reverse | CCAAGAATGGCTCAACAAACTCACC | 269 |
| WNV/PaRV-prME [CA] | PaRV-E_F | forward | GGTGAGTTTGTTGAGCCATTCTTGG | 270 |
| WNV/PaRV-prME [CA] | KC/PPr_R | reverse | GGATTGTCACTGCTCCCACG | 271 |
| WNV/PaRV-prME [CA] | KC/PPr_F | forward | CGTGGGAGCAGTGACAATCC | 272 |
| WNV/PaRV-prME [CA] | KC/PPr2_R | reverse | ATCAGTAGTGACAACCACTTGGATTGTCACTGCTCCCACG | 273 |
| | | | CCAGCAATCAAGCCAATCAT | |
| WNV/PaRV-prME [CA] | KC/PPr2_F | forward | ATGATTGGCTTGATTGCTGGCGTGGGAGCAGTGACAATC | 274 |
| | | | CAAGTGGTTGTCACTACTGAT | |
| WNV/PaRV-prME [CA] | K/B(S)-C-SEQ_F | forward | CAGAAGAAGAGAGGAGGAAAGACC | 275 |
| WNV/PaRV-prME [CA] | KUNV-5′UTR_R | reverse | GGCCCTCCTGGTTTCTTAGAC | 276 |
| WNV/PaRV-prME [CA] | KUNV-C-prM_F | forward | GTCTAAGAAACCAGGAGGGCC | 277 |
| WNV/PaRV-prME [CA] | KUNV-UTRlinker_R | reverse | CAGCTCACACAGGCGAACTACT | 278 |
| WNV/PaRV-prME [CA] | KUNV-5′UTR_F | forward | AGTAGTTCGCCTGTGTGAGCTG | 279 |
| WNV/PaRV-prME [CA] | pUC19-R | reverse | TGGATGGCCTTCCCCATTAT | 280 |
| WNV/PaRV-prME [CA] | OplE2-F | forward | CATTATAAGCTGCAATAAACAAGTT | 281 |
| WNV/PaRV-prME [CA] | DNA Linker-F | forward | GGGTCGGCATGGCATCTCC | 282 |
| WNV/PCV-prME [CA] | KUNV-3′UTR_R | reverse | TCCTGTGTTCTCGCACCAC | 283 |
| WNV/PCV-prME [CA] | KUNV-UTRlinker_F | forward | GTGGTGCGAGAACACAGGA | 284 |
| WNV/PCV-prME [CA] | KUN-NS5(only)-R | reverse | TTACAATACTGTATCCTCAACCAATG | 285 |
| WNV/PCV-prME [CA] | KUNV-NS5_R | reverse | CTGTATCCTCAACCAATGTTGTGTCTTC | 286 |
| WNV/PCV-prME [CA] | KUNV-3′UTR_F | forward | GAAGACACAACATTGGTTGAGGATACAG | 287 |
| WNV/PCV-prME [CA] | KUN-NS5(only)-F | forward | GGTGGGGCAAAAGGAC | 288 |
| WNV/PCV-prME [CA] | KUNV-NS4B_R | reverse | CGTCCTTTTGCCCCACCTC | 289 |
| WNV/PCV-prME [CA] | KUNV-NS5_F | forward | GAGGTGGGGCAAAAGGACG | 290 |
| WNV/PCV-prME [CA] | KUNV-NS4A_R | reverse | CCCATCTCATTGGCTGCCAC | 291 |
| WNV/PCV-prME [CA] | KUNV-NS4B_F | forward | GTGGCAGCCAATGAGATGGG | 292 |
| WNV/PCV-prME [CA] | qWNns4A R | reverse | TAGCTGGTTGTCTGTCTGCG | 293 |
| WNV/PCV-prME [CA] | qWNns4A F | forward | TTGAGTGTGATGACCATGGGAG | 294 |
| WNV/PCV-prME [CA] | KUNV-NS3_R | reverse | GACCTCGATAAAACCTATTTGAGAGCGC | 295 |
| WNV/PCV-prME [CA] | KUNV-NS4A_F | forward | GCGCTCTCAAATAGGTTTTATCGAGGTC | 296 |
| WNV/PCV-prME [CA] | KUNV-NS2B_R | reverse | CTCCTCTCTTTGTGTATTGGAGAGTTATC | 297 |
| WNV/PCV-prME [CA] | KUNV-NS3_F | forward | GATAACTCTCCAATACACAAAGAGAGGAG | 298 |
| WNV/PCV-prME [CA] | KUNV-NS2A_R | reverse | CTTCAGTTGCAGGCCACCC | 299 |
| WNV/PCV-prME [CA] | KUNV-NS2B_F | forward | GGGTGGCCTGCAACTGAAG | 300 |
| WNV/PCV-prME [CA] | KUNV-NS1_R | reverse | GAAAAGGATCAATCATGTCAGCGTTGTAG | 301 |
| WNV/PCV-prME [CA] | KUNV-NS2A_F | forward | CTACAACGCTGACATGATTGATCCTTTTC | 302 |
| WNV/PCV-prME [CA] | KUN-NS1-INT_R | reverse | CGGTCCATCCAAGCTTCCAC | 303 |
| WNV/PCV-prME [CA] | PCV-E/KUN-NS1_R | reverse | GGCACATCCAGTATCGGCTCGCACAAAATA | 304 |
| WNV/PCV-prME [CA] | PCV-E/KUN-NS1_F | forward | TATTTTGTGCGAGCCGATACTGGATGTGCC | 305 |
| WNV/PCV-prME [CA] | PCV-M_R | reverse | CGGTTCCATGTATTCTCCTCGAACCGTTGT | 306 |
| WNV/PCV-prME [CA] | PCV-E_F | forward | ACAACGGTTCGAGGAGAATACATGGAACCG | 307 |
| WNV/PCV-prME [CA] | KUN-C/PCV-Pr_R | reverse | GTCAATCACCACAACTGCTCCCACGCCAGC | 308 |
| WNV/PCV-prME [CA] | KUN-C/PCV-Pr_F | forward | GCTGGCGTGGGAGCAGTTGTGGTGATTGAC | 309 |
| WNV/PCV-prME [CA] | K/B(S)-C-SEQ_F | forward | CAGAAGAAGAGAGGAGGAAAGACC | 310 |
| WNV/PCV-prME [CA] | KUNV-5′UTR_R | reverse | GGCCCTCCTGGTTTCTTAGAC | 311 |
| WNV/PCV-prME [CA] | KUNV-C-prM_F | forward | GTCTAAGAAACCAGGAGGGCC | 312 |
| WNV/PCV-prME [CA] | KUNV-UTRlinker_R | reverse | CAGCTCACACAGGCGAACTACT | 313 |
| WNV/PCV-prME [CA] | KUNV-5′UTR_F | forward | AGTAGTTCGCCTGTGTGAGCTG | 314 |
| WNV/PCV-prME [CA] | pUC19-R | reverse | TGGATGGCCTTCCCCATTAT | 315 |
| WNV/PCV-prME [CA] | OplE2-F | forward | CATTATAAGCTGCAATAAACAAGTT | 316 |
| WNV/PCV-prME [CA] | DNA Linker-F | forward | GGGTCGGCATGGCATCTCC | 317 |
| PCV/DENV2-prME [CA] | PCV 3′-R | reverse | ATGCCATGCCGACCCAGACGTAGCCAAGTA | 318 |
| PCV/DENV2-prME [CA] | PCV CA Linker-F | forward | TACTTGGCTACGTCTGGGTCGGCATGGCAT | 319 |
| PCV/DENV2-prME [CA] | PCV NS5-R | reverse | CATCGTCACACTTCAGTTGAACACAGGATC | 320 |
| PCV/DENV2-prME [CA] | PCV 3′-F | forward | GATCCTGTGTTCAACTGAAGTGTGACGATG | 321 |
| PCV/DENV2-prME [CA] | PCV-NS5-INT_F | forward | CCGTATTTACCCAAAGGAGTGGAC | 322 |
| PCV/DENV2-prME [CA] | PCV NS4B-R | reverse | ACTCTTCACCAGCGAGCGCACGCCCAATCT | 323 |
| PCV/DENV2-prME [CA] | PCV NS5-F | forward | AGATTGGGCGTGCGCTCGCTGGTGAAGAGT | 324 |
| PCV/DENV2-prME [CA] | PCV NS2B-R | reverse | TAGCTCCGAATTTGCCCGCTGGGACATAGC | 325 |
| PCV/DENV2-prME [CA] | PCV NS3-F | forward | GCTATGTCCCAGCGGGCAAATTCGGAGCTA | 326 |
| PCV/DENV2-prME [CA] | DENVE-PCV1_R | reverse | TCCACATCCGAAGTCGGCCTGCACCATAAC | 327 |
| PCV/DENV2-prME [CA] | DENVE-PCV1_F | forward | GTTATGGTGCAGGCCGACTTCGGATGTGGA | 328 |
| PCV/DENV2-prME [CA] | DENV2 M_R | reverse | TGCAGCGCATTGTCATTGAA | 329 |
| PCV/DENV2-prME [CA] | DENV2 E_F | forward | TTCAATGACAATGCGCTGCA | 330 |
| PCV/DENV2-prME [CA] | PCVC-DENVE_R | reverse | TGTGGTCAGATGAAATCCCATAACTCCGAA | 331 |
| PCV/DENV2-prME [CA] | PCVC-DENVE_F | forward | TTCGGAGTTATGGGATTTCATCTGACCACA | 332 |
| PCV/DENV2-prME [CA] | PCV-C-INT_R | reverse | CTCGCTTTTCCTCCTTGCTG | 333 |
| PCV/DENV2-prME [CA] | PCV CA Linker-R | reverse | GCAAAAGTTTTTTAAAACTGTTTACCAGATCGTTGC | 334 |
| PCV/DENV2-prME [CA] | PCV CA 5′-F | forward | GCAACGATCTGGTAAACAGTTTTAAAAAACTTTTGC | 335 |
| PCV/DENV2-prME [CA] | pUC19-R | reverse | TGGATGGCCTTCCCCATTAT | 336 |
| PCV/DENV2-prME [CA] | Op1E2-F | forward | CATTATAAGCTGCAATAAACAAGTT | 337 |
| PCV/DENV2-prME [CA] | DNA Linker-F | forward | GGGTCGGCATGGCATCTCC | 338 |
| PCV/WNV-prME [CA] | PCV 3′-R | reverse | ATGCCATGCCGACCCAGACGTAGCCAAGTA | 339 |
| PCV/WNV-prME [CA] | PCV CA Linker-F | forward | TACTTGGCTACGTCTGGGTCGGCATGGCAT | 340 |
| PCV/WNV-prME [CA] | PCV NS5-R | reverse | CATCGTCACACTTCAGTTGAACACAGGATC | 341 |
| PCV/WNV-prME [CA] | PCV 3′-F | forward | GATCCTGTGTTCAACTGAAGTGTGACGATG | 342 |
| PCV/WNV-prME [CA] | PCV-NS5-INT_F | forward | CCGTATTTACCCAAAGGAGTGGAC | 343 |
| PCV/WNV-prME [CA] | PCV NS4B-R | reverse | ACTCTTCACCAGCGAGCGCACGCCCAATCT | 344 |
| PCV/WNV-prME [CA] | PCV NS5-F | forward | AGATTGGGCGTGCGCTCGCTGGTGAAGAGT | 345 |
| PCV/WNV-prME [CA] | PCV NS2B-R | reverse | TAGCTCCGAATTTGCCCGCTGGGACATAGC | 346 |
| PCV/WNV-prME [CA] | PCV NS3-F | forward | GCTATGTCCCAGCGGGCAAATTCGGAGCTA | 347 |
| PCV/WNV-prME [CA] | KUNE-PCV1-R | reverse | TCCACATCCGAAGTCAGCATGCACGTTCAC | 348 |
| PCV/WNV-prME [CA] | KUNE-PCV1-F | forward | GTGAACGTGCATGCTGACTTCGGATGTGGA | 349 |
| PCV/WNV-prME [CA] | KUN-E-Seq-F | forward | GCATGGACCAACTACCG | 350 |
| PCV/WNV-prME [CA] | KUNV-C-prM_R | reverse | GGAAATCTCTGTTGCTCATTCCAAGACAG | 351 |
| PCV/WNV-prME [CA] | KUNV-E_F | forward | CTGTCTTGGAATGAGCAACAGAGATTTCC | 352 |
| PCV/WNV-prME [CA] | PCVC-KUNVpr-R | reverse | GTTGGAGAGAGTGACTCCCATAACTCCGAA | 353 |
| PCV/WNV-prME [CA] | PCVC-KUNVpr-F | forward | TTCGGAGTTATGGGAGTCACTCTCTCCAAC | 354 |
| PCV/WNV-prME [CA] | PCV-C-INT_R | reverse | CTCGCTTTTCCTCCTTGCTG | 355 |
| PCV/WNV-prME [CA] | PCV CA Linker-R | reverse | GCAAAAGTTTTTTAAAACTGTTTACCAGATCGTTGC | 356 |
| PCV/WNV-prME [CA] | PCV CA 5′-F | forward | GCAACGATCTGGTAAACAGTTTTAAAAAACTTTTGC | 357 |
| PCV/WNV-prME [CA] | pUC19-R | reverse | TGGATGGCCTTCCCCATTAT | 358 |
| PCV/WNV-prME [CA] | OplE2-F | forward | CATTATAAGCTGCAATAAACAAGTT | 359 |
| PCV/WNV-prME [CA] | DNA Linker-F | forward | GGGTCGGCATGGCATCTCC | 360 |
| PCV/ZIKV-prME [CA] | PCV 3′-R | reverse | ATGCCATGCCGACCCAGACGTAGCCAAGTA | 361 |
| PCV/ZIKV-prME [CA] | PCV CA Linker-F | forward | TACTTGGCTACGTCTGGGTCGGCATGGCAT | 362 |
| PCV/ZIKV-prME [CA] | PCV NS5-R | reverse | CATCGTCACACTTCAGTTGAACACAGGATC | 363 |
| PCV/ZIKV-prME [CA] | PCV 3′-F | forward | GATCCTGTGTTCAACTGAAGTGTGACGATG | 364 |
| PCV/ZIKV-prME [CA] | PCV-NS5-INT_F | forward | CCGTATTTACCCAAAGGAGTGGAC | 365 |
| PCV/ZIKV-prME [CA] | PCV NS4B-R | reverse | ACTCTTCACCAGCGAGCGCACGCCCAATCT | 366 |
| PCV/ZIKV-prME [CA] | PCV NS5-F | forward | AGATTGGGCGTGCGCTCGCTGGTGAAGAGT | 367 |
| PCV/ZIKV-prME [CA] | PCV NS2B-R | reverse | TAGCTCCGAATTTGCCCGCTGGGACATAGC | 368 |
| PCV/ZIKV-prME [CA] | PCV NS3-F | forward | GCTATGTCCCAGCGGGCAAATTCGGAGCTA | 369 |
| PCV/ZIKV-prME [CA] | ZIKVE-PCV1_R | reverse | TCCACATCCGAAGTCAGCAGAGACGGCTGT | 370 |
| PCV/ZIKV-prME [CA] | ZIKVE-PCV1_F | forward | ACAGCCGTCTCTGCTGACTTCGGATGTGGA | 371 |
| PCV/ZIKV-prME [CA] | Zika M_R | reverse | TGCACCTGATGCTGTATGCC | 372 |
| PCV/ZIKV-prME [CA] | Zika E_F | forward | GGCATACAGCATCAGGTGCA | 373 |
| PCV/ZIKV-prME [CA] | PCVC-ZIKVPr_R | reverse | TCTAGTGACCTCCGCTCCCATAACTCCGAA | 374 |
| PCV/ZIKV-prME [CA] | PCVC-ZIKVPr_F | forward | TTCGGAGTTATGGGAGCGGAGGTCACTAGA | 375 |
| PCV/ZIKV-prME [CA] | PCV-C-INT_R | reverse | CTCGCTTTTCCTCCTTGCTG | 376 |
| PCV/ZIKV-prME [CA] | PCV CA Linker-R | reverse | GCAAAAGTTTTTTAAAACTGTTTACCAGATCGTTGC | 377 |
| PCV/ZIKV-prME [CA] | PCV CA 5′-F | forward | GCAACGATCTGGTAAACAGTTTTAAAAAACTTTTGC | 378 |
| PCV/ZIKV-prME [CA] | pUC19-R | reverse | TGGATGGCCTTCCCCATTAT | 379 |
| PCV/ZIKV-prME [CA] | OplE2-F | forward | CATTATAAGCTGCAATAAACAAGTT | 380 |
| PCV/ZIKV-prME [CA] | DNA Linker-F | forward | GGGTCGGCATGGCATCTCC | 381 |

TABLE 2
Binding profiles of a panel of 9 mAbs to epitopes on WNV prM, and all
3 domains of the WNV E protein (including quaternary prM/E
epitopes) confirm that PCV/WNV_{KUN}-prME and BinJV/WNV_{KUN}-
prME particles are antigenically identical to WNV in these regions. Data also
demonstrates that cross-reactive mAbs to the fusion loop in the EII domain
and a quaternary prM/E epitope, fail to bind to BinJV due to a Valine
at residue 106 in the wild type virus.

| | Anti-WNV mAb reactivity | | | | | | | | | |
|---|---|---|---|---|---|---|---|---|---|---|
| Virus/mAb | prM + E | prM | EDI | EDII | | | EDIII | | | NS1 |
| target | M2-1E7 | P10F8 | 17D7 | 4G2 | 6B6C1 | P3H8 | 3.91D | 2B2 | 3.67G | 3.1112G |
| WNV | + | + | + | + | + | + | + | + | + | + |
| PCV- | + | + | + | + | + | + | + | + | + | − |
| WNV_{STR}* | | | | | | | | | | |
| BinJV- | + | + | + | + | + | + | + | + | + | − |
| WNV_{STR}^{#} | | | | | | | | | | |
| PCV | − | − | − | − | − | − | − | − | − | − |
| BinJV | − | − | − | − | − | − | − | − | − | − |
| BinJV_{V106G} | + | − | − | + | + | + | − | − | − | − |

TABLE 3
Binding profiles of a panel of 5 mAbs to epitopes on ZIKV E
protein confirm that PCV/ZIKV-prME particles are antigenically
identical to ZIKV in these regions.

| | Anti-ZIKV mAb reactivity | | | | | | |
|---|---|---|---|---|---|---|---|
| Virus/mAb | EDII | | | | EDIII | NS1 | |
| target | 5G12 | 4G2 | 6B6C1 | P3H8 | 4A4 | 3H3 | 2G1 |
| ZIKV | + | + | + | + | + | + | + |
| PCV- | + | + | + | + | + | − | − |
| ZIKV_{STR}* | | | | | | | |

1. An isolated protein comprising:
(i) an amino acid sequence of a protein encoded by the genome of an insect-specific flavivirus; and
(ii) an immunogenic amino acid sequence not encoded by the genome of an insect-specific flavivirus.

2. The isolated protein of claim 1, wherein the insect-specific flavivirus of (i) is capable of infecting a plurality of different insects.

3. The isolated protein of claim 1, wherein the insect-specific flavivirus of (i) has a native host selected from the group consisting of Coquillettidia spp.; Aedes spp.; Anopheles spp.; Mansonia spp.; Toxorhynchites spp.; Aedeomyia spp.; and Culex spp.

4. The isolated protein claim 1, wherein the insect-specific flavivirus of (i) is selected from the group consisting of Palm Creek virus; Binjari virus; Lilly Creek Virus; Bamaga virus; Parramatta River virus; Cell fusing agent virus; and Karumba virus.

5. (canceled)

6. The isolated protein of claim 1, wherein the immunogenic amino acid sequence (ii) is of a protein encoded by the genome of a flavivirus that is not insect specific.

7. The isolated protein of claim 6, wherein the immunogenic amino acid sequence (ii) is of a structural protein encoded by the genome of the flavivirus that is not insect-specific, preferably wherein the structural protein is a prM protein and/or an Envelope protein.

8. The isolated protein of claim 6, wherein the immunogenic amino acid sequence (ii) is of a protein encoded by the genome of a vertebrate-infecting flavivirus, preferably wherein the vertebrate-infecting flavivirus is a mammalian-infecting flavivirus; a human-infecting flavivirus; an avian-infecting flavivirus; or a reptile-infecting flavivirus.

9. The isolated protein of claim 6, wherein the immunogenic sequence (ii) is of a protein encoded by the genome of a flavivirus selected from the group consisting of Zika virus; West Nile virus; Dengue virus; Japanese encephalitis virus; Yellow fever virus; tick-borne encephalitis virus; St Louis encephalitis virus; Murray valley encephalitis virus; Duck tembusu virus; Turkey Meningoencephalitis Virus; Usutu virus; Sepik virus; Wesselsbron virus; Baiyangdian Virus; and Sitiawan Virus.

10. (canceled)

11. The isolated protein of claim 1, wherein the isolated protein is or comprises an amino acid sequence set forth in SEQ ID NOS:1-4 or SEQ ID NOS:32, 389, 391, or 395, or SEQ ID NOS:20, 22, 24, 26, 28, 30, 384, 393, 397, or 402-405, or a fragment, variant, or derivative thereof.

12. (canceled)

13. The isolated protein of claim 1, wherein the isolated protein is encoded by a nucleotide sequence set forth in SEQ ID NOS: 11, 12, 13, 14, 21, 23, 25, 26, 27, 29, 31, 33, 385, 386, 388, 390, 392, 394, 396, or 398-401, or a fragment, variant, or derivative thereof.

14. An isolated nucleic acid encoding the amino acid sequence of the isolated protein of claim 1.

15. (canceled)

16. A genetic construct comprising the isolated nucleic acid of claim 14.

17. The genetic construct of claim 16, wherein the genetic construct is present in a host cell.

18. An isolated chimeric insect-specific flavivirus comprising an isolated protein that comprises: (i) an amino acid sequence of a protein encoded by the genome of an insect-specific flavivirus; and (ii) an immunogenic amino acid sequence not encoded by the genome of an insect-specific flavivirus; and an isolated nucleic acid that encodes said isolated protein.

19. A vector comprising:
(i) the isolated nucleic acid of claim 14; and
(ii) an insect-specific promoter operably connected to the isolated nucleic acid (i).

20-27. (canceled)

28. A method of producing an isolated chimeric insect-specific flavivirus, the method including the steps of:
(a) combining a vector comprising (i) a nucleotide sequence capable of replicating the chimeric insect-specific flavivirus, the chimeric insect-specific flavivirus comprising: an isolated protein comprising an amino acid sequence of a protein encoded by the genome of an insect-specific flavivirus and an immunogenic amino acid sequence not encoded by the genome of an insect-specific flavivirus; and an isolated nucleic acid that encodes said isolated protein; and (ii) an insect-specific promoter operably connected to (i), with an insect cell; and
(b) allowing said chimeric insect-specific flavivirus replicable by (i) to replicate in the insect cell,
to thereby produce the isolated chimeric insect-specific flavivirus.

29-30. (canceled)

31. A method of modifying a chimeric insect-specific flavivirus, a protein of a chimeric insect-specific flavivirus, and/or a nucleic acid of a chimeric insect-specific flavivirus, including the step of replicating a chimeric insect-specific flavivirus in a cell, whereby one or more mutations are incorporated into the chimeric insect-specific flavivirus, a protein thereof, and/or nucleotide sequence thereof, to thereby modify the chimeric insect-specific flavivirus, protein thereof, and/or nucleic acid thereof.

32-35. (canceled)

36. A method including the step of administering an effective amount of a pharmaceutical composition to a subject, the pharmaceutical composition comprising:
(a) an isolated protein comprising: (i) an amino acid sequence of a protein encoded by the genome of an insect-specific flavivirus; and (ii) an immunogenic amino acid sequence not encoded by the genome of an insect-specific flavivirus;
(b) a genetic construct comprising an isolated nucleic acid that encodes the isolated protein of (a);
(c) a vector comprising an isolated nucleic acid that encodes the isolated protein of (a) and an insect-specific promoter operably connected to the isolated nucleic acid; and/or
(d) an isolated chimeric insect-specific flavivirus comprising the isolated protein of (a); and an isolated nucleic acid that encodes said isolated protein;
wherein the method:
(i) elicits an immune response in the subject;
(ii) immunizes the subject against a pathogen; or
(iii) treats or prevents a disease, disorder or condition in the subject.

37-40. (canceled)

41. A method of detecting, identifying or screening for an antibody in a sample, the method including the steps of combining a diagnostic composition with the sample, the diagnostic composition comprising:
(a) an isolated protein comprising: (i) an amino acid sequence of a protein encoded by the genome of an insect-specific flavivirus; and (ii) an immunogenic amino acid sequence not encoded by the genome of an insect-specific flavivirus; and/or
(b) an isolated chimeric insect-specific flavivirus comprising the isolated protein of (a); and an isolated nucleic acid that encodes said isolated protein;
wherein binding of an antibody in the sample to an immunogenic amino acid sequence of the isolated protein or isolated chimeric insect-specific flavivirus of the diagnostic composition facilitates detecting, identifying or screening for the antibody in the sample.

42. (canceled)

The application's sequence listing, which the Patent Office published only in electronic form, follows.

SEQUENCE LISTING (405 sequences)

SEQ ID NO: 1 - protein, 3460 aa, Artificial Sequence
  Synthetic
MNQERGILRGMGRFPPPPVKKGNKNSVAVARVPPQQGGKAREKNRERIKAPGARHGVAGKMKSLMGELGFGWIDLLRVDLVEGIMMMVFVIQRAFAQVHRRIRGLSRRVRALEKKRDGRAAMFIWTILAMLFGVMGVTLSNFQGKVMMTVNATDVTDIITIPTAAGKNLCIVRAMDVGHMCDDTITYECPVLSAGNDPEDIDCWCTKLAVYVRYGRCTKTRHSRRSRRSLTVQTHGESTLSNKKGAWMDSTKATRYLVKTESWILRNPGYALVAAVIGWMLGSNTMQRVVFAVLLLLVAPAYSFNCLGMSNRDFLEGVSGATWVDLVLEGDSCVTIMSKDKPTIDVKMMNMEAANLAEVRSYCYLATVSELSTKAACPTMGEAHNDKRADPSFVCKQGVVDRGWGNGCGLFGKGSIDTCAKFACSTKATGRTILKENIKYEVAIFVHGPTTVESHGNYFTQTGAAQAGRFSITPAAPSYTLKLGEYGEVTVDCEPRSGIDTSAYYVMTVGTKTFLVHREWFMDLNLPWSSAESNVWRNRETLMEFEEPHATKQSVIALGSQEGALHQALAGAIPVEFSSNTVKLTSGHLKCRVKMEKLQLKGTTYGVCSKAFRFLGTPADTGHGTVVLELQYTGTDGPCKIPISSVASLNDLTPVGRLVTVNPFVSVSTANAKVLIELEPPFGDSYIVVGRGEQQINHHWHKSGSSIGKAFTATLKGAQRLAALGDTAWDFGSVGGVFTSVGKAVHQVFGGAFRSLFGGMSWITQGLLGALLLWMGINARDRSIALTFLAVGGVLLFLSVNVHADFGCGFDPDRKVAQCGSGSFVWKSLARWPMADHAIEFEDSKVMVTYLTDLLMRKNKVCIVCEDVLQCAAARGVVEQITSINGIPIHHNMSLSHGRYFPRVVKKVHNVKVGKAMLRLAMATYAGAMPESGLGVLKTGYFSRGEVQETWDDKVLRVLTSAINAEEVCQTAVTFQYEFVRYNRKVFGSNIVLRPSAFTSKACPTYLAGAVVKNDIATFTDGMMWMRSRKVNETWELFELETTQSHQCIWPYAYTIDLATPTDKRLFMPPQYGGPISFANHVPGFQVQEDFPWQKANILMRQGPVPGTTVVQDPHCDDRSAAVPVEPTMQAWCCKTCFDRGVKPFHFVVDGKFFYPMEVRPMKLEQDAVVIETDDGEFERSEHESLFEGKAKWTSPLPMGETAKIQNFFVTSPPKPESSLLLVGVLIHMLTTRTRHRWATRCAGTWLIFLVFGHPVVSSVQSWAWLFMSAALASVPGGSSLVIHFWIGLQISSAHLFYLGWLMRKRLLITEMSRVAHLIAQLCSFETYAWAPILKVLDHLLFPLYTLSVFVVHQQFQVFHDLWLQSAVVMAHLLQHPLSGLITLSLSVGLIQLIAPMKRWFCSPVIWGDGLRAPRPHWTALTYFIVLYLAAAGMETVGLHTSGMTVMLGGMLLWVVLQLMPPTALELVRLPGQSLPDGCEEEASTSLPEGMSGHYAPDGVELVNYTDAGTVSANLVVFVGCAGIMTMNIYVGLVITALAWVTDAPMWIPRLIDGAMSQRANSELLLPSPPLEIHKTEDSFGYIPDGTYHVLASSWMSKKPVGVGVVKEGVFHTLHHVTKGANVTWAGREVRMHSGDVRRDIAAYGGPWNISGSLEDVVVVKAVNKDGTVTCCRITTAKLDIEGTTVMAVERDFGFGSSGSPIYAPDGRLIGLYGYGFYYGTYFSIVSTGEGVEAPPEEVEVSTREFVDWHPGRGKTRTILVEQALKHIADGKRLLILTPTRVVKDEVQRAIKEAAPQAVIGSNLSIFRKNAVTLACHATFTQYVMEKGIESVKFSTIIMDECHFLDPMSIACRGIMDFHNSRGTKVIFMSATPPGRAGNAGSNFTIEDRAIKFPKELTASWIKDKSIGKTIVFVPTITQAVRLAKELGGVALTRDTFNDAMGKARSPETMFIISTDISEMGANLGVTTVIDTRTVIKPLVSDKGVSLERVGVTPASIIQRRGRVGRREPGVYIYPLDVEPEEQPENWVCWVEAQMILDQLGCHPMREESEFFRPQGTYRIDDVEQRRFLGLIKEKLPIWLAWTWASSHANKHQMLFQGNAPNTGRTLKIKTPSGSHIYAPKVTDDRFEKEPEIVKVAAIGFFLKQRSLYFDLPGLLTGLYTVLTTAGLDALGNSFKRSVDTLHDIGNAVEGEFSAIQMGRILQMWSALFIGVTLGVVLMGAGFVVVKAFRGLFGTRQQHTTVCVSEGGSFQKVATVLMSVGPLCAVFGGIPSIFVFIVTVALLIVLCVGGGGSQRGVLDSDLIRWVMVLAMMTIGVTAWELELLPNVRRDVIQLTRYLFASNPAVVGAVFNAGNIGLGVSLPGTLMMSYAASGTLAPLIGAWAEGNFLGKLFGSEVLPAQAIGGFQVTAIPWGSMVPVIAGCFLATNTLSKVFGAGITTVFLILLYFDKKHAFTNKAVKVLLARTNRRDMEEEITTRDAESRARQLFYGLQLAVSLLWVLSHPVLENFVPFFAVCGYTFLSLLRPNHQLHAALDYTLVVLLLQVVEPGNIMYVGGCVLLWYVLNPTRLGVRSLVKSDTGGLGFRWKKALNSLSERQFAIYKVRGVNETDKGAYVSRGGLKMNEIINKHAWEPRGVVVDLGCGRGGWSQRLVMDYRVAEVRGYTLGGKERENPQPFQTKGYNLANLKAGVDVYKMEPVNCNTIICDIGESDPRPEVEKTRTLKVLGMLEKWLEVNPNASFCCKVLSPYHLDVLRKLESLQHKYNGRLVRLSYSRNSTAEMYYVSGKRANVVASVYFMLGSLVGRLRRHEPSIIDPPPVLEMGTRSDPRAKAKAQDFEMIRRRVERLRGENRKTWFVDNEHPYVSFNYHGSFVTDEVTAGGQTTNPLIRRVMWPWDFLSRVTTFMMTDVSTYAQQKVLREKVDTVSEEPDERMKAINRLIMTHFVKMFKRRGLKPRVLTPQDYMNNVQANAAIGGWSEVMDWQNVRDALADQRFWDMVDNERALHLRGDCELCIYNTMGKKEKKPSAFGTAKGSRTIWYMWLGSRYLEYEALGFLNEDHWVARENFPCGVGGVGVNYFGYYLKEIAGGGRWLIADDVAGWDTRITQGDLDDELFMLTELAPTTYHKKLITATMTLAYKNIVALFPRNHPMYRSGTVLDVLSRTDQRGSGQVTTYALNTVTNGKCQVGRTLEACGLLDAPLTTIDSWLTANLERVLGAMVVAGDDVVVATDNEEFHTSLRYITATSKIRKNLGVSEPSPRFTSWEDVEFCSHHFHPLTLRDGRVLIAPCRDQNEIIGRSRIQKGGIVDMASAGCLAKAHAQMWALYFFHRRDLRIGFAAITSIVPINWVPTGRISWSIHQNAEWMTTEDMLTVWNNVWIRDNPWMRGKERVTSWTDIPYLPKGVDIKCGSLIGDSDRASWSKTIPLVVEKTRKILEQERGTLKFYNGLSILGRYVHHVDPVFN

SEQ ID NO: 2 - protein, 3464 aa, Artificial Sequence
  Synthetic
MNQERGILRGMGRFPPPPVKKGNKNSVAVARVPPQQGGKAREKNRERIKAPGARHGVAGKMKSLMGELGFGWIDLLRVDLVEGIMMMVFVIQRAFAQVHRRIRGLSRRVRALEKKRDGRAAMFIWTILAMLFGVMGAEVTRRGSAYYMYLDRNDAGEAISFPTTLGMNKCYIQIMDLGHMCDATMSYECPMLDEGVEPDDVDCWCNTTSTWVVYGTCHHKKGEARRSRRAVTLPSHSTRKLQTRSQTWLESREYTKHLIRVENWIFRNPGFALAAAAIAWLLGSSTSQKVIYLVMILLIAPAYSIRCIGVSNRDFVEGMSGGTWVDVVLEHGGCVTVMAQDKPTVDIELVTTTVSNMAEVRSYCYEASISDMASDSRCPTQGEAYLDKQSDTQYVCKRTLVDRGWGNGCGLFGKGSLVTCAKFACSKKMTGKSIQPENLEYRIMLSVHGSQHSGMIVNDTGHETDENRAKVEITPNSPRAEATLGGFGSLGLDCEPRTGLDFSDLYYLTMNNKHWLVHKEWFHDIPLPWHAGADTGTPHWNNKEALVEFKDAHAKRQTVVVLGSQEGAVHTALAGALEAEMDGAKGRLSSGHLKCRLKMDKLRLKGVSYSLCTAAFTFTKIPAETLHGTVTVEVQYAGTDGPCKVPAQMAVDMQTLTPVGRLITANPVITESTENSKMMLELDPPFGDSYIVIGVGEKKITHHWHRSGSTIGKAFEATVRGAKRMAVLGDTAWDFGSVGGALNSLGKGIHQIFGAAFKSLFGGMSWFSQILIGTLLMWLGLNTKNGSISLMCLALGGVLIFLSTAVSADFGCGFDPDRKVAQCGSGSFVWKSLARWPMADHAIEFEDSKVMVTYLTDLLMRKNKVCIVCEDVLQCAAARGVVEQITSINGIPIHHNMSLSHGRYFPRVVKKVHNVKVGKAMLRLAMATYAGAMPESGLGVLKTGYFSRGEVQETWDDKVLRVLTSAINAEEVCQTAVTFQYEFVRYNRKVFGSNIVLRPSAFTSKACPTYLAGAVVKNDIATFTDGMMWMRSRKVNETWELFELETTQSHQCIWPYAYTIDLATPTDKRLFMPPQYGGPISFANHVPGFQVQEDFPWQKANILMRQGPVPGTTVVQDPHCDDRSAAVPVEPTMQAWCCKTCFDRGVKPFHFVVDGKFFYPMEVRPMKLEQDAVVIETDDGEFERSEHESLFEGKAKWTSPLPMGETAKIQNFFVTSPPKPESSLLLVGVLIHMLTTRTRHRWATRCAGTWLIFLVFGHPVVSSVQSWAWLFMSAALASVPGGSSLVIHFWIGLQISSAHLFYLGWLMRKRLLITEMSRVAHLIAQLCSFETYAWAPILKVLDHLLFPLYTLSVFVVHQQFQVFHDLWLQSAVVMAHLLQHPLSGLITLSLSVGLIQLIAPMKRWFCSPVIWGDGLRAPRPHWTALTYFIVLYLAAAGMETVGLHTSGMTVMLGGMLLWVVLQLMPPTALELVRLPGQSLPDGCEEEASTSLPEGMSGHYAPDGVELVNYTDAGTVSANLVVFVGCAGIMTMNIYVGLVITALAWVTDAPMWIPRLIDGAMSQRANSELLLPSPPLEIHKTEDSFGYIPDGTYHVLASSWMSKKPVGVGVVKEGVFHTLHHVTKGANVTWAGREVRMHSGDVRRDIAAYGGPWNISGSLEDVVVVKAVNKDGTVTCCRITTAKLDIEGTTVMAVERDFGFGSSGSPIYAPDGRLIGLYGYGFYYGTYFSIVSTGEGVEAPPEEVEVSTREFVDWHPGRGKTRTILVEQALKHIADGKRLLILTPTRVVKDEVQRAIKEAAPQAVIGSNLSIFRKNAVTLACHATFTQYVMEKGIESVKFSTIIMDECHFLDPMSIACRGIMDFHNSRGTKVIFMSATPPGRAGNAGSNFTIEDRAIKFPKELTASWIKDKSIGKTIVFVPTITQAVRLAKELGGVALTRDTFNDAMGKARSPETMFIISTDISEMGANLGVTTVIDTRTVIKPLVSDKGVSLERVGVTPASIIQRRGRVGRREPGVYIYPLDVEPEEQPENWVCWVEAQMILDQLGCHPMREESEFFRPQGTYRIDDVEQRRFLGLIKEKLPIWLAWTWASSHANKHQMLFQGNAPNTGRTLKIKTPSGSHIYAPKVTDDRFEKEPEIVKVAAIGFFLKQRSLYFDLPGLLTGLYTVLTTAGLDALGNSFKRSVDTLHDIGNAVEGEFSAIQMGRILQMWSALFIGVTLGVVLMGAGFVVVKAFRGLFGTRQQHTTVCVSEGGSFQKVATVLMSVGPLCAVFGGIPSIFVFIVTVALLIVLCVGGGGSQRGVLDSDLIRWVMVLAMMTIGVTAWELELLPNVRRDVIQLTRYLFASNPAVVGAVFNAGNIGLGVSLPGTLMMSYAASGTLAPLIGAWAEGNFLGKLFGSEVLPAQAIGGFQVTAIPWGSMVPVIAGCFLATNTLSKVFGAGITTVFLILLYFDKKHAFTNKAVKVLLARTNRRDMEEEITTRDAESRARQLFYGLQLAVSLLWVLSHPVLENFVPFFAVCGYTFLSLLRPNHQLHAALDYTLVVLLLQVVEPGNIMYVGGCVLLWYVLNPTRLGVRSLVKSDTGGLGFRWKKALNSLSERQFAIYKVRGVNETDKGAYVSRGGLKMNEIINKHAWEPRGVVVDLGCGRGGWSQRLVMDYRVAEVRGYTLGGKERENPQPFQTKGYNLANLKAGVDVYKMEPVNCNTIICDIGESDPRPEVEKTRTLKVLGMLEKWLEVNPNASFCCKVLSPYHLDVLRKLESLQHKYNGRLVRLSYSRNSTAEMYYVSGKRANVVASVYFMLGSLVGRLRRHEPSIIDPPPVLEMGTRSDPRAKAKAQDFEMIRRRVERLRGENRKTWFVDNEHPYVSFNYHGSFVTDEVTAGGQTTNPLIRRVMWPWDFLSRVTTFMMTDVSTYAQQKVLREKVDTVSEEPDERMKAINRLIMTHFVKMFKRRGLKPRVLTPQDYMNNVQANAAIGGWSEVMDWQNVRDALADQRFWDMVDNERALHLRGDCELCIYNTMGKKEKKPSAFGTAKGSRTIWYMWLGSRYLEYEALGFLNEDHWVARENFPCGVGGVGVNYFGYYLKEIAGGGRWLIADDVAGWDTRITQGDLDDELFMLTELAPTTYHKKLITATMTLAYKNIVALFPRNHPMYRSGTVLDVLSRTDQRGSGQVTTYALNTVTNGKCQVGRTLEACGLLDAPLTTIDSWLTANLERVLGAMVVAGDDVVVATDNEEFHTSLRYITATSKIRKNLGVSEPSPRFTSWEDVEFCSHHFHPLTLRDGRVLIAPCRDQNEIIGRSRIQKGGIVDMASAGCLAKAHAQMWALYFFHRRDLRIGFAAITSIVPINWVPTGRISWSIHQNAEWMTTEDMLTVWNNVWIRDNPWMRGKERVTSWTDIPYLPKGVDIKCGSLIGDSDRASWSKTIPLVVEKTRKILEQERGTLKFYNGLSILGRYVHHVDPVFN

SEQ ID NO: 3 - protein, 3453 aa, Artificial Sequence
  synthetic
MNQERGILRGMGRFPPPPVKKGNKNSVAVARVPPQQGGKAREKNRERIKAPGARHGVAGKMKSLMGELGFGWIDLLRVDLVEGIMMMVFVIQRAFAQVHRRIRGLSRRVRALEKKRDGRAAMFIWTILAMLFGVMGFHLTTRNGEPHMIVSRQEKGKSLLFKTKDGTNMCTLMAMDLGELCEDTITYKCPFLKQNEPEDIDCWCNSTSTWVTYGTCTTTGEHRREKRSVALVPHVGMGLETRTETWMSSEGAWKHAQRIETWILRHPGFTIMAAILAYTIGTTHFQRVLIFILLTAIAPSMTMRCIGISNRDFVEGVSGGSWVDIVLEHGSCVTTMAKNKPTLDFELIKTEAKQPATLRKYCIEAKLTNTTTDSRCPTQGEPTLNEEQDKRFVCKHSMVDRGWGNGCGLFGKGGIVTCAMFTCKKNMEGKIVQPENLEYTVVITPHSGEEHAVGNDTGKHGKEVKITPQSSITEAELTGYGTVTMECSPRTGLDFNEMVLLQMKDKAWLVHRQWFLDLPLPWLPGADTQGSNWIQKETLVTFKNPHAKKQDVVVLGSQEGAMHTALTGATEIQMSSGNLLFTGHLKCRLRMDKLQLKGMSYSMCTGKFKIVKEIAETQHGTIVIRVQYEGDGSPCKIPFEIMDLEKRHVLGRLITVNPIVTEKDSPVNIEAEPPFGDSYIIIGVEPGQLKLDWFKKGSSIGQMFETTMRGAKRMAILGDTAWDFGSLGGVFTSIGKALHQVFGAIYGAAFSGVSWTMKILIGVIITWIGMNSRSTSLSVSLVLVGIVTLYLGVMVQADFGCGFDPDRKVAQCGSGSFVWKSLARWPMADHAIEFEDSKVMVTYLTDLLMRKNKVCIVCEDVLQCAAARGVVEQITSINGIPIHHNMSLSHGRYFPRVVKKVHNVKVGKAMLRLAMATYAGAMPESGLGVLKTGYFSRGEVQETWDDKVLRVLTSAINAEEVCQTAVTFQYEFVRYNRKVFGSNIVLRPSAFTSKACPTYLAGAVVKNDIATFTDGMMWMRSRKVNETWELFELETTQSHQCIWPYAYTIDLATPTDKRLFMPPQYGGPISFANHVPGFQVQEDFPWQKANILMRQGPVPGTTVVQDPHCDDRSAAVPVEPTMQAWCCKTCFDRGVKPFHFVVDGKFFYPMEVRPMKLEQDAVVIETDDGEFERSEHESLFEGKAKWTSPLPMGETAKIQNFFVTSPPKPESSLLLVGVLIHMLTTRTRHRWATRCAGTWLIFLVFGHPVVSSVQSWAWLFMSAALASVPGGSSLVIHFWIGLQISSAHLFYLGWLMRKRLLITEMSRVAHLIAQLCSFETYAWAPILKVLDHLLFPLYTLSVFVVHQQFQVFHDLWLQSAVVMAHLLQHPLSGLITLSLSVGLIQLIAPMKRWFCSPVIWGDGLRAPRPHWTALTYFIVLYLAAAGMETVGLHTSGMTVMLGGMLLWVVLQLMPPTALELVRLPGQSLPDGCEEEASTSLPEGMSGHYAPDGVELVNYTDAGTVSANLVVFVGCAGIMTMNIYVGLVITALAWVTDAPMWIPRLIDGAMSQRANSELLLPSPPLEIHKTEDSFGYIPDGTYHVLASSWMSKKPVGVGVVKEGVFHTLHHVTKGANVTWAGREVRMHSGDVRRDIAAYGGPWNISGSLEDVVVVKAVNKDGTVTCCRITTAKLDIEGTTVMAVERDFGFGSSGSPIYAPDGRLIGLYGYGFYYGTYFSIVSTGEGVEAPPEEVEVSTREFVDWHPGRGKTRTILVEQALKHIADGKRLLILTPTRVVKDEVQRAIKEAAPQAVIGSNLSIFRKNAVTLACHATFTQYVMEKGIESVKFSTIIMDECHFLDPMSIACRGIMDFHNSRGTKVIFMSATPPGRAGNAGSNFTIEDRAIKFPKELTASWIKDKSIGKTIVFVPTITQAVRLAKELGGVALTRDTFNDAMGKARSPETMFIISTDISEMGANLGVTTVIDTRTVIKPLVSDKGVSLERVGVTPASIIQRRGRVGRREPGVYIYPLDVEPEEQPENWVCWVEAQMILDQLGCHPMREESEFFRPQGTYRIDDVEQRRFLGLIKEKLPIWLAWTWASSHANKHQMLFQGNAPNTGRTLKIKTPSGSHIYAPKVTDDRFEKEPEIVKVAAIGFFLKQRSLYFDLPGLLTGLYTVLTTAGLDALGNSFKRSVDTLHDIGNAVEGEFSAIQMGRILQMWSALFIGVTLGVVLMGAGFVVVKAFRGLFGTRQQHTTVCVSEGGSFQKVATVLMSVGPLCAVFGGIPSIFVFIVTVALLIVLCVGGGGSQRGVLDSDLIRWVMVLAMMTIGVTAWELELLPNVRRDVIQLTRYLFASNPAVVGAVFNAGNIGLGVSLPGTLMMSYAASGTLAPLIGAWAEGNFLGKLFGSEVLPAQAIGGFQVTAIPWGSMVPVIAGCFLATNTLSKVFGAGITTVFLILLYFDKKHAFTNKAVKVLLARTNRRDMEEEITTRDAESRARQLFYGLQLAVSLLWVLSHPVLENFVPFFAVCGYTFLSLLRPNHQLHAALDYTLVVLLLQVVEPGNIMYVGGCVLLWYVLNPTRLGVRSLVKSDTGGLGFRWKKALNSLSERQFAIYKVRGVNETDKGAYVSRGGLKMNEIINKHAWEPRGVVVDLGCGRGGWSQRLVMDYRVAEVRGYTLGGKERENPQPFQTKGYNLANLKAGVDVYKMEPVNCNTIICDIGESDPRPEVEKTRTLKVLGMLEKWLEVNPNASFCCKVLSPYHLDVLRKLESLQHKYNGRLVRLSYSRNSTAEMYYVSGKRANVVASVYFMLGSLVGRLRRHEPSIIDPPPVLEMGTRSDPRAKAKAQDFEMIRRRVERLRGENRKTWFVDNEHPYVSFNYHGSFVTDEVTAGGQTTNPLIRRVMWPWDFLSRVTTFMMTDVSTYAQQKVLREKVDTVSEEPDERMKAINRLIMTHFVKMFKRRGLKPRVLTPQDYMNNVQANAAIGGWSEVMDWQNVRDALADQRFWDMVDNERALHLRGDCELCIYNTMGKKEKKPSAFGTAKGSRTIWYMWLGSRYLEYEALGFLNEDHWVARENFPCGVGGVGVNYFGYYLKEIAGGGRWLIADDVAGWDTRITQGDLDDELFMLTELAPTTYHKKLITATMTLAYKNIVALFPRNHPMYRSGTVLDVLSRTDQRGSGQVTTYALNTVTNGKCQVGRTLEACGLLDAPLTTIDSWLTANLERVLGAMVVAGDDVVVATDNEEFHTSLRYITATSKIRKNLGVSEPSPRFTSWEDVEFCSHHFHPLTLRDGRVLIAPCRDQNEIIGRSRIQKGGIVDMASAGCLAKAHAQMWALYFFHRRDLRIGFAAITSIVPINWVPTGRISWSIHQNAEWMTTEDMLTVWNNVWIRDNPWMRGKERVTSWTDIPYLPKGVDIKCGSLIGDSDRASWSKTIPLVVEKTRKILEQERGTLKFYNGLSILGRYVHHVDPVFN

SEQ ID NO: 4 - protein, 3411 aa, Artificial Sequence
  Synthetic
MSNPSVRRGVNVMAAQKKRVAQKIKSMRKGTQSISNGVRGFILFFISQIFWARKITPRVKGLWKKLDKFQAMKVLKGLRNIINGLMRSVAGKKKRRGGNTVPFLVMMMVATTWAVTLSNFQGKVMMTVNATDVTDIITIPTAAGKNLCIVRAMDVGHMCDDTITYECPVLSAGNDPEDIDCWCTKLAVYVRYGRCTKTRHSRRSRRSLTVQTHGESTLSNKKGAWMDSTKATRYLVKTESWILRNPGYALVAAVIGWMLGSNTMQRVVFAVLLLLVAPAYSFNCLGMSNRDFLEGVSGATWVDLVLEGDSCVTIMSKDKPTIDVKMMNMEAANLAEVRSYCYLATVSELSTKAACPTMGEAHNDKRADPSFVCKQGVVDRGWGNGCGLFGKGSIDTCAKFACSTKATGRTILKENIKYEVAIFVHGPTTVESHGNYFTQTGAAQAGRFSITPAAPSYTLKLGEYGEVTVDCEPRSGIDTSAYYVMTVGTKTFLVHREWFMDLNLPWSSAESNVWRNRETLMEFEEPHATKQSVIALGSQEGALHQALAGAIPVEFSSNTVKLTSGHLKCRVKMEKLQLKGTTYGVCSKAFRFLGTPADTGHGTVVLELQYTGTDGPCKIPISSVASLNDLTPVGRLVTVNPFVSVSTANAKVLIELEPPFGDSYIVVGRGEQQINHHWHKSGSSIGKAFTATLKGAQRLAALGDTAWDFGSVGGVFTSVGKAVHQVFGGAFRSLFGGMSWITQGLLGALLLWMGINARDRSIALTFLAVGGVLLFLSVNVHAEYGCSLDFQRKELKCGDGVFVFNDANDWLTKYRYHPEDPRTLASLVKASYKAGRCGLGSVDNMEHKMWVSLENELNAIFEENQENISVVVKESNGIYPKGNYPFTGTPEKLKYGWKTWGKKLVFAPVLSNNTFVIDGTPDDCPYSNRVWNSFEIDEFGAGLTHTRVFLKQRLERKEECDNALLGAAAKGDVAVHGDPNFWMASNKTGEVWQINELMSLNLKHCTWPLSHTLHGNGVLESDMFVPKSIGGPVSHHNFIKGYKSQVNGPWASVPLEMHRRECPDTVVQIDQNCSGRGKSTRSTTKEGKIIRDWCCRNCTLPPVSFDGPDGCWYAMEIRPQKMNEKHLVTSWVSAGDGMENGNIGLVALFVCFDMFLKNKNTRKISLVGALCLLGAMILGNVGFVDLIKFMIVVGEHFRSFNHGGDVSYLVLTAVFDIRPALLCGFVLRKKWSPSERVVMAIGMMLLQTVCGDWTQTSWWEWLDAVGLGLLILNAVALQRWKPAILVLLTMLTPLNMRVIQGAAGGVCGVMVAMSLWKTEGRSLRKSYLPVIGYVASAFGWGYSWIMAVYIMWATHVSRRSWPVGELAAAIGLLGAAMGMASTKDGAMVMPIAVLGLIMVIIGMTGKCDGMEIRKVGCVSWEDSAEISGSSSRYDVALSDGGEFQLLENSRPPWNHIIFLTLGMLASAVHPIVLGVVILAWGWFAGKSQRSGVLWDVPVAPKVEDHGPLEDGIYTIFQNGLFGSSQAGVGVAQGGVFHTMWHVTRGGILLHKGKRLTPGWASVKSDLISYGGKWRLDGSWDGVEEVQLIAVPPRKNPINVQTKPSIFKLKSGEEMGAIALDYPSGTSGSPIVNRAGVVVGLYGNGIVLNQGGYVSAISQAAVEEVSRDELPGIEGYLRKGQLTVLDFHPGAGKTRNFLPQILKACRTRKLRTLVLAPTRVVLSEMKEALNDHDVKYHTQAFSSASSGRELIDAMCHATLAYRLLESTRVINWEVVIMDEAHYMDPASIAVRGWAAHRARAHECATIFMSATPPGTANEFPESNGGIEDIRKDIPSEAWNKGHEWILEDRRPTVWFLPSIRSANNIAACLRKANRTVVVLNRQTFESVYPTIKTKKPDFILATDIAEMGANLHVERVIDCRTAFKPVLSEDQERVTLKGPMRISASAAAQRRGRVGRDPSRESDTYYYGEDTSEDNDHLVCWTEASMILDNMEIKGGMVAPLYSVEATKTKMTPGECRLRDDQRKTFRALIKKHELPVWVSWKVAKAGITPDDRKWCFDGEEDNTVLNDMGEKVMGRSPGGAKKALCPRWSDARLTSDNASLMNFLAFAEGRRSYMRIVDALIMVPPMLKEKVVDAADTLALLLRSEEGSRAYKLAQESAPEAITTLIMVTFLVLLSAGLVLMLMWPKGISKMSLGMLTMSVAGYLLLEGGLTQVQVAGILLVFFILMVVLIPDDGSQRSINDNKLAYMMTGIILLVGAVAANEMGWLEKTKQDLFGKREEMPGWNWDLGLDLRPGAAWTTYVALATVLGPVIDHWIQVEYGSASLTGIANSAGISAFLDKGVPFMKVNMAVVVLFVSAWNSYSMLAIMEGCLMAGIHFCLLIPGLKARAMKKAQKRIYHGLSKNPVVDGTPTVDIEEAEETPVLYEKKVALALLGVVAALNGIVVRTPFSMAESIVLGSALVGPFIEGNTSPLWNAPIAVAFAGLMRGHYSSMIGLAYNFWILQNPKRGGGETMTLGQVWKKRLNMLDKKEFAKYKISDIHEVDRRQARTILDAGITNVGVSVSRGTSKLKWLTDRGYFKPEGRVVDLGCGRGGWSYLAAAARETLEVKAYTLGVSGHERPIQIQSLGWNVIKFKDRVDVHRLPIAQCDTVMCDIGESSSSWEQERERTLRVIDLMENWVAKSRPKYCFKVLAPYSSEVIERLELFQRRFGGGIIRVPLSRNSTHEMYYTSEVTNNIVHMVNCVSRLLLRRMTNPSGIAILEPDVVFPTGTRNVKGDLGPLDMEKIKMRVSKLKKENLDTWWHDENHPYRTWHYLGSYVAKQSGSAATMVNGIVKLLSMPWDRIEDVTALAMTDTTPYGQQRVFKEKVDTRAPPPPPGTRKIMSITNTWLFDFLGRSKQPRLCTKAEFIAKVRSHAAIGNMLEEQEGWKNAAEAVNDPRFWELVSEERELHLQGKCSTCIYNMMGKREKKPAEFGRAKGSRAIWYMWLGARFLEFEALGFLNEDHWFSRDNSKGGVEGMGLQYLGYVVEDVWKKGNGIMYADDTAGWDTRITEADLEDEQYLLEKMSGTHKKLAWAITELTYKNKVVKVPRPGPGGKILMDVIARRDQRGSGQVVTYPLNTGTNLKTQLIRMAEGEGIITPEDTLQLSHKNEKNLREWLCTHGAERLGRMAVSGDDCIVAPIDERFGNALSHLNAMSKIRKDIDDWEPSKPWMKWEEVPFCSHHFHHLLLKDGRRIIVPCRNQDELIGRARVSPGNGWMIKETACHSKSYGQMWLLMYFHRRDLRLMANAISSCVPINWVPTGRTTWSLHAGGEWMTSEDMLEVWNRVWILDNPHMSDKSVILEWRDVPYLAKSDDIRCGSLIGTSQRACWAANIRSVVEKIRHLVGDEKYKDYLHSMDRYALEHSEIGCLI

SEQ ID NO: 5 - protein, 3364 aa, Palm Creek virus
MNQERGILRGMGRFPPPPVKKGNKNSVAVARVPPQQGGKAREKNRERIKAPGARHGVAGKMKSLMGELGFGWIDLLRVDLVEGIMMMVFVIQRAFAQVHRRIRGLSRRVRALEKKRDGRAAMFIWTILAMLFGVMGVVVIDMRVTYDGQVQIYRDGENMTDRVALFKLPTDGCSVGLPVSKMCHKVDKNMKEGLADTDCGSTWAEFRLRYQRCQVKTRAKRVAPDGPKQDFLAEVEIVAFKAIRENKSVLLVVVLCVAIAKRWPLWVLILLSIGTWTTVRGEYMEPLYVLKADQMTMIQTTLRPEEGYVTATANGLFEMKTGRAFIYGSQVVKTLVTDCEVNATYSTDICPGGSQLSMQDIQAEGRACASEPYNRGWGTGCFKWGVGFVATCAEVDCTTSVKVSSVARSTIKMNVTATYHSVKSVQSVISDVPVTFQFGQLGIASMTCRLESDRIAQSYYHVEGNKKEGLFMKEQIDGWNGATLAAGKIANTEKIVIWGDVKPNEILVKAVSEPQLEWTNAIATHDGFRDVGFVCQIMLDKLVTGVFKDCKTPKTSTFTQSGFGFDGIITTTLAVAQTEACSISISCKGCTLLATKAVFSAGDIESKTWVRCGNESGTAIVGGQEVAVACATNPITQGWRLVKHATQRYRKFGMPGVGGVFHDLVGTLNPWSFFSTTTLVFMAVVLFIVDKRILILGIACYMFYFVRADFGCGFDPDRKVAQCGSGSFVWKSLARWPMADHAIEFEDSKVMVTYLTDLLMRKNKVCIVCEDVLQCAAARGVVEQITSINGIPIHHNMSLSHGRYFPRVVKKVHNVKVGKAMLRLAMATYAGAMPESGLGVLKTGYFSRGEVQETWDDKVLRVLTSAINAEEVCQTAVTFQYEFVRYNRKVFGSNIVLRPSAFTSKACPTYLAGAVVKNDIATFTDGMMWMRSRKVNETWELFELETTQSHQCIWPYAYTIDLATPTDKRLFMPPQYGGPISFANHVPGFQVQEDFPWQKANILMRQGPVPGTTVVQDPHCDDRSAAVPVEPTMQAWCCKTCFDRGVKPFHFVVDGKFFYPMEVRPMKLEQDAVVIETDDGEFERSEHESLFEGKAKWTSPLPMGETAKIQNFFVTSPPKPESSLLLVGVLIHMLTTRTRHRWATRCAGTWLIFLVFGHPVVSSVQSWAWLFMSAALASVPGGSSLVIHFWIGLQISSAHLFYLGWLMRKRLLITEMSRVAHLIAQLCSFETYAWAPILKVLDHLLFPLYTLSVFVVHQQFQVFHDLWLQSAVVMAHLLQHPLSGLITLSLSVGLIQLIAPMKRWFCSPVIWGDGLRAPRPHWTALTYFIVLYLAAAGMETVGLHTSGMTVMLGGMLLWVVLQLMPPTALELVRLPGQSLPDGCEEEASTSLPEGMSGHYAPDGVELVNYTDAGTVSANLVVFVGCAGIMTMNIYVGLVITALAWVTDAPMWIPRLIDGAMSQRANSELLLPSPPLEIHKTEDSFGYIPDGTYHVLASSWMSKKPVGVGVVKEGVFHTLHHVTKGANVTWAGREVRMHSGDVRRDIAAYGGPWNISGSLEDVVVVKAVNKDGTVTCCRITTAKLDIEGTTVMAVERDFGFGSSGSPIYAPDGRLIGLYGYGFYYGTYFSIVSTGEGVEAPPEEVEVSTREFVDWHPGRGKTRTILVEQALKHIADGKRLLILTPTRVVKDEVQRAIKEAAPQAVIGSNLSIFRKNAVTLACHATFTQYVMEKGIESVKFSTIIMDECHFLDPMSIACRGIMDFHNSRGTKVIFMSATPPGRAGNAGSNFTIEDRAIKFPKELTASWIKDKSIGKTIVFVPTITQAVRLAKELGGVALTRDTFNDAMGKARSPETMFIISTDISEMGANLGVTTVIDTRTVIKPLVSDKGVSLERVGVTPASIIQRRGRVGRREPGVYIYPLDVEPEEQPENWVCWVEAQMILDQLGCHPMREESEFFRPQGTYRIDDVEQRRFLGLIKEKLPIWLAWTWASSHANKHQMLFQGNAPNTGRTLKIKTPSGSHIYAPKVTDDRFEKEPEIVKVAAIGFFLKQRSLYFDLPGLLTGLYTVLTTAGLDALGNSFKRSVDTLHDIGNAVEGEFSAIQMGRILQMWSALFIGVTLGVVLMGAGFVVVKAFRGLFGTRQQHTTVCVSEGGSFQKVATVLMSVGPLCAVFGGIPSIFVFIVTVALLIVLCVGGGGSQRGVLDSDLIRWVMVLAMMTIGVTAWELELLPNVRRDVIQLTRYLFASNPAVVGAVFNAGNIGLGVSLPGTLMMSYAASGTLAPLIGAWAEGNFLGKLFGSEVLPAQAIGGFQVTAIPWGSMVPVIAGCFLATNTLSKVFGAGITTVFLILLYFDKKHAFTNKAVKVLLARTNRRDMEEEITTRDAESRARQLFYGLQLAVSLLWVLSHPVLENFVPFFAVCGYTFLSLLRPNHQLHAALDYTLVVLLLQVVEPGNIMYVGGCVLLWYVLNPTRLGVRSLVKSDTGGLGFRWKKALNSLSERQFAIYKVRGVNETDKGAYVSRGGLKMNEIINKHAWEPRGVVVDLGCGRGGWSQRLVMDYRVAEVRGYTLGGKERENPQPFQTKGYNLANLKAGVDVYKMEPVNCNTIICDIGESDPRPEVEKTRTLKVLGMLEKWLEVNPNASFCCKVLSPYHLDVLRKLESLQHKYNGRLVRLSYSRNSTAEMYYVSGKRANVVASVYFMLGSLVGRLRRHEPSIIDPPPVLEMGTRSDPRAKAKAQDFEMIRRRVERLRGENRKTWFVDNEHPYVSFNYHGSFVTDEVTAGGQTTNPLIRRVMWPWDFLSRVTTFMMTDVSTYAQQKVLREKVDTVSEEPDERMKAINRLIMTHFVKMFKRRGLKPRVLTPQDYMNNVQANAAIGGWSEVMDWQNVRDALADQRFWDMVDNERALHLRGDCELCIYNTMGKKEKKPSAFGTAKGSRTIWYMWLGSRYLEYEALGFLNEDHWVARENFPCGVGGVGVNYFGYYLKEIAGGGRWLIADDVAGWDTRITQGDLDDELFMLTELAPTTYHKKLITATMTLAYKNIVALFPRNHPMYRSGTVLDVLSRTDQRGSGQVTTYALNTVTNGKCQVGRTLEACGLLDAPLTTIDSWLTANLERVLGAMVVAGDDVVVATDNEEFHTSLRYITATSKIRKNLGVSEPSPRFTSWEDVEFCSHHFHPLTLRDGRVLIAPCRDQNEIIGRSRIQKGGIVDMASAGCLAKAHAQMWALYFFHRRDLRIGFAAITSIVPINWVPTGRISWSIHQNAEWMTTEDMLTVWNNVWIRDNPWMRGKERVTSWTDIPYLPKGVDIKCGSLIGDSDRASWSKTIPLVVEKTRKILEQERGTLKFYNGLSILGRYVHHVDPVFN

SEQ ID NO: 6 - protein, 3433 aa, Binjari virus
MVTKLRRPVKRAVDMMRRAVPRAAGPRRVLTRVSNTVKRNAGALRALLAYLLYQTFSGRKVGSGARSALKRFNKNDIVKMLLAFRRTLTNIITTMQRRVKGKKRRGVQDVPLLVLLLVGAGAMAATLRTVGDLTWLNVSTTDVGKWIRVENRHGKGECFVTATDVGTWCSDSVGYECPQIAPAYDPEDLDCYCRNTSTYVTYGRCKNGRSGRSRSKRAITIAPHGEAGLRVGSTKHWTSRATPQRYLMRVEKWVLRHPLPALVLVVLGWMMGRSHGQRAMYIVLMLLVAPSYGNQCLDVQSRDFVQGVSGGTWVDVVLDHDNCITIVADGKPSFDIRLSKMSMSKFAEYKRYCLQATMSDVTSIVACPGAGDAHNDKSKNHEYICKAVNNDRGWGNGCVLFGKGSMETCGKFECKKKMAGKLVARENVESVVTVHVHGASATDTKGVDTASTAKATITPKASVATLNLNDFGSLEVDCSTDVGMDFGEIVVADMSGKWWIVNKDWFNELALPWSTASTTAEVWQARDRLVEFGWPHAAKQNIYDIGDQEGAVTAAIAQAPMAKWESDKVELISGILKCKVKLGNLKLRGVTYSMCAQTFTTETRPADTGHGTVAFKVKYVGTDVPCRVPLHIIDSDGGVAAGRVITAHPFVMKQNDYIILEVEPPFGDSKIEIGTGTTKLVEAWHRKGSSIGNAFTATYKGITKLTVLGEHAWDFNSLGGFGASLGKAVHTLFGGVFRVMFGGMGWLTKIFVGAVLVWLGLGAHDKTIATTMILVGSILMYMAVTVGALSEIGCSLDISRKEMKCGDGVFIFREAGMWKDGYAFHPSEPKSLAASVLKSWQSGVCGVRSTNRMEHAMWKQIENELNGILEENEAQLSVVVRESNGTFPRGERRMHVAEPLRYGWKTWGKTAISTVPLAKETFVVDGNDEGECPSQMRAWNSFQVEEFGTGLVKTKVFLDISTALTAQCDTKMLGAAIKGNRSVHGDPGLWMVSAEIDGTWQIIELTLAESRRCTWPDSHTVWGRNVQESELILPPSFGGPMTNMNKRKGYATQVGGPWNHVPLRVVFEECPGTTVSVEPNCTRRSDSVRSTTDSGKIITDWCCRSCTMPPLTYRTPDGCWYAMEIRPKNVKEESLIRSHVAAGVFKGIDDVSLGLLVMIIFLQEGLRRKLTATYIMWAALVVLIAGILGELTVRDVLRYLILVGTAFAESNNGGDLIHLALVAVFKIRPAFLFGFLFRSQWSPREGVLLASGALMLQIASECLHASAIMQVVDSLSMGWLMIRAIAVPGMTSKAMPLLCACIPAVTSLLAHSTRAGIITMAGMSLIAGSKGSSVKKHSPYMLALVVAGLGARPIGMLAMEAFSHLKGRRSWPAGEMMSAVGLTCALVGAISGASSQDFAGPLAAAALIIIAYAISGRSADVYLEKAGEISWSEDAKISGSSPRIDVCVTENGDFKLRHESEATWTRNCVLAACLVVAGVHPLGIPVAGLMWFGYVKSNKRGTVLWDIPSPQATSAPTVEDGCYRVMSRRLLGSTQLGVGIMLDSTFHTMWHITRGASIVSGEGRLDPYWADVKEDLVCYGGPWKIRNTWDGLSEVQLIAVAPKENPVNVQTMPGKFIVANGGEIGAVVLDYPPGTSGSPIVDQQGNVIGLYGNGVMINDQTYASAIAQAPAEVARTPTWFTDDMLRKGQLHVLDLHPGAGKTRKVLPEILKAAVEKRLRTLVLAPTRVVAKEMHEALTGLPVRYQTSAVAPNGSGGELIDVMCHATYTHRQLTPGRGVNYQLYIVDEAHFTDPASIAARGIIATRVRLGHAAAIFMTATPPGMSNPFPESNAHIEDEEREVPTKAWNAGYEWITDYGGKTVWFVPSIRMANTIAACLVRAGKTVIVLHSGSFNEEYQKTKSGNWDFVVTTDISEMGANFKASRVIDSRLSIKPMFSYAPSERVVIGSPRAVSPASAAQRRGRVGRDPRQLGDQYIYGGPVGEDSAEFVHWKEARILMDNVTVPGGLYPQFYEPEGGMCDAMDGAHRLTDAKREVFRDLMKKGELPVWLAYQVAQAGHAYTDRTWCYGGPADHQVYDDCGQTVDYRSLNGERRMLRPKWLDQRTYNDKTSLRLFTEFAEGRRRYSELMDVFGRMPQHMLDRTILAADTFKDVLTATPGSRVHRLALDNLPEATETMMVVGILSVSTLGVMLFLMSPKGMTRMTCGLVVIILATYFLWVSGMAGYQIAAMQLIAFILFVVLVPEPGSQRSVQDNTIAIILIVILSLAAIIAANEAGLLEKTKKDFAWKRESHVLVTPSPWNLDFSMDLRPATSWSLYVVMATMLGPVLEHAIVTNYASVSLTAITNQAGILLSMDKGTPFWNLDWSVVLLCVGSWSGINGTTLMVASTMTVLHFAMILPGIRAKAAREAQNRTAAGVSKNPLIDGLNTINIQPLPEMDPMYERKMGLWMLIAVAGAAVVFDKRMLHYTEFGVLGSAAVSPLIEGYASAVWNTSVAASVCNLMRGHYMAGIPMAYSLIRNLSMKGVPRRGLQATHTLGMVWKHKLNAMDKAAFNAYRKDGVTEVDREPAREAMKKGDLVSGWAVSRGSAKLRWMHERGYIPLQGVVIDLGCGRGGWSYYAAAQRRVTAVKGLTKGGPGHEEPINVQSYGWNLVTFRSGVDVFHTEVQPADTLLCDIGESSADPAVEKARTVQVLVNFERWIRESRCEHFCCKVLGPYSPEVMERLDRLTKTYGGAVIRNPLSRNSTHEMYWVSGAKGNPVNAITATSRVLIERMYRRLGKSYWEEDVNLGTGTRAVSCAAEKPDLAKIGRRIELLKKEYKASWFEDPEHPYKTWTYHGSYETKTTGSSSSMINGVVKEITHPWDTNPRVTTVCMTDTTPFGQQRVFKEKVDTKAREPSQGTREIMRIVSKWLTLYIGRSKRPRLCTADEFIAKVNADAALGTMFDSQGNWANAKEAVRDPRFWQLVAKERELHLRGQCATCVYNMMGKREKKLTEFGKSKGSRAIWFMWLGARFLEFESLGFLNEDHWLSRENSGGGVEGIGLQYLGYVLKEMALIPGGKMYADDTAGWDTRITNADLEDEMDILGLMDPHHKKLAKNLMELAYNNKVVRVMRPGKGGKTLMDIISRKDQRGSGQVVTYPLNTWTNLKVQLIRMAESEGVLDPKEIDGITVTTRNNLEKWLTSQGAERLKRIAASGDDVVVKPVDERFANALTYLNDMAKIRKDISEWKPSAGWFHWEEVPFCSHHFHQLVLKDGRTLVVPCRDQDELIGRARVSPGAGWTIRETAGLSKAYAQMWLLMHFHRRDLRMAGFAICSAVPSDWVPTGRTSWSLHAKGEWMTTEDMLAVWNRVWIEDNPHMSNKTLVGSWQDIPYQRKSLDIHCGSMIGQRSRSTWAANIRISIGHVRRLIGTTEKYLDYMQEQERFKIAEPTRLGNVI

SEQ ID NO: 7 - protein, 3400 aa, Bamaga virus
MSNPSVRRGVNVMAAQKKRVAQKIKSMRKGTQSISNGVRGFILFFISQIFWARKITPRVKGLWKKLDKFQAMKVLKGLRNIINGLMRSVAGKKKRRGGNTVPFLVMMMVATTWALTLRKIDNTIVLNVTQNDIGKTFPVRGGNCSININDAGYWCHNTVEYDCVTIAGTEEPDDIDCWCVGIEGVRVTYGKCSKSSPHGRRSRRAAVIPAHGGQGLSTHKETWLSTVAGERQIQRIERWIIRNPLYAAAMVTVAYFLGSDTKQKVLLAVLMLAIGPAYGSHCIGIERRDFVHGVQGSTWVNLVLDQGSCVTMVTENKPSVDVWLKEISLSQPTLVRRYSHTAKVHKTEIKAACPTMGEAKLDTEHNPSYECKRTYSDRGWGNGCGLFGKGSIIACAEFSSTGHMDVYEIDMTKIEYIVNSQIHGTVLVENNSQHAVESKFQPTTGGAEVTHAGYGTLGLDCHVQTMMDLNNFYLAVMGSDAWLVHKQWVEDLTLPWMAGETGHWKEKKYLVEFGEPHATKMEALVLGSQEGALRTALAGAMVVVYSQNDKKFTLKGGHVSCRARLTDLTLKGTSYPMCKGSLKFTKTPVDTGHGTAVMHVQVTKGAPCRIGVQMADNSNGGKSLGSMITSNPIVSTDGEETLVEVSPPYGESYIIVGSGDGKLVYHWHKTGSTIGSLFSETMKGAKRLAILGDDAWDFSSTGGVLASVGKMLHTVFGQAFHAIFGGLSWISKIILGCVMLWIGVNSRNGTLSVTLLTVGGILLFMTLGVNAEYGCSLDFQRKELKCGDGVFVFNDANDWLTKYRYHPEDPRTLASLVKASYKAGRCGLGSVDNMEHKMWVSLENELNAIFEENQENISVVVKESNGIYPKGNYPFTGTPEKLKYGWKTWGKKLVFAPVLSNNTFVIDGTPDDCPYSNRVWNSFEIDEFGAGLTHTRVFLKQRLERKEECDNALLGAAAKGDVAVHGDPNFWMASNKTGEVWQINELMSLNLKHCTWPLSHTLHGNGVLESDMFVPKSIGGPVSHHNFIKGYKSQVNGPWASVPLEMHRRECPDTVVQIDQNCSGRGKSTRSTTKEGKIIRDWCCRNCTLPPVSFDGPDGCWYAMEIRPQKMNEKHLVTSWVSAGDGMENGNIGLVALFVCFDMFLKNKNTRKISLVGALCLLGAMILGNVGFVDLIKFMIVVGEHFRSFNHGGDVSYLVLTAVFDIRPALLCGFVLRKKWSPSERVVMAIGMMLLQTVCGDWTQTSWWEWLDAVGLGLLILNAVALQRWKPAILVLLTMLTPLNMRVIQGAAGGVCGVMVAMSLWKTEGRSLRKSYLPVIGYVASAFGWGYSWIMAVYIMWATHVSRRSWPVGELAAAIGLLGAAMGMASTKDGAMVMPIAVLGLIMVIIGMTGKCDGMEIRKVGCVSWEDSAEISGSSSRYDVALSDGGEFQLLENSRPPWNHIIFLTLGMLASAVHPIVLGVVILAWGWFAGKSQRSGVLWDVPVAPKVEDHGPLEDGIYTIFQNGLFGSSQAGVGVAQGGVFHTMWHVTRGGILLHKGKRLTPGWASVKSDLISYGGKWRLDGSWDGVEEVQLIAVPPRKNPINVQTKPSIFKLKSGEEMGAIALDYPSGTSGSPIVNRAGVVVGLYGNGIVLNQGGYVSAISQAAVEEVSRDELPGIEGYLRKGQLTVLDFHPGAGKTRNFLPQILKACRTRKLRTLVLAPTRVVLSEMKEALNDHDVKYHTQAFSSASSGRELIDAMCHATLAYRLLESTRVINWEVVIMDEAHYMDPASIAVRGWAAHRARAHECATIFMSATPPGTANEFPESNGGIEDIRKDIPSEAWNKGHEWILEDRRPTVWFLPSIRSANNIAACLRKANRTVVVLNRQTFESVYPTIKTKKPDFILATDIAEMGANLHVERVIDCRTAFKPVLSEDQERVTLKGPMRISASAAAQRRGRVGRDPSRESDTYYYGEDTSEDNDHLVCWTEASMILDNMEIKGGMVAPLYSVEATKTKMTPGECRLRDDQRKTFRALIKKHELPVWVSWKVAKAGITPDDRKWCFDGEEDNTVLNDMGEKVMGRSPGGAKKALCPRWSDARLTSDNASLMNFLAFAEGRRSYMRIVDALIMVPPMLKEKVVDAADTLALLLRSEEGSRAYKLAQESAPEAITTLIMVTFLVLLSAGLVLMLMWPKGISKMSLGMLTMSVAGYLLLEGGLTQVQVAGILLVFFILMVVLIPDDGSQRSINDNKLAYMMTGIILLVGAVAANEMGWLEKTKQDLFGKREEMPGWNWDLGLDLRPGAAWTTYVALATVLGPVIDHWIQVEYGSASLTGIANSAGISAFLDKGVPFMKVNMAVVVLFVSAWNSYSMLAIMEGCLMAGIHFCLLIPGLKARAMKKAQKRIYHGLSKNPVVDGTPTVDIEEAEETPVLYEKKVALALLGVVAALNGIVVRTPFSMAESIVLGSALVGPFIEGNTSPLWNAPIAVAFAGLMRGHYSSMIGLAYNFWILQNPKRGGGETMTLGQVWKKRLNMLDKKEFAKYKISDIHEVDRRQARTILDAGITNVGVSVSRGTSKLKWLTDRGYFKPEGRVVDLGCGRGGWSYLAAAARETLEVKAYTLGVSGHERPIQIQSLGWNVIKFKDRVDVHRLPIAQCDTVMCDIGESSSSWEQERERTLRVIDLMENWVAKSRPKYCFKVLAPYSSEVIERLELFQRRFGGGIIRVPLSRNSTHEMYYTSEVTNNIVHMVNCVSRLLLRRMTNPSGIAILEPDVVFPTGTRNVKGDLGPLDMEKIKMRVSKLKKENLDTWWHDENHPYRTWHYLGSYVAKQSGSAATMVNGIVKLLSMPWDRIEDVTALAMTDTTPYGQQRVFKEKVDTRAPPPPPGTRKIMSITNTWLFDFLGRSKQPRLCTKAEFIAKVRSHAAIGNMLEEQEGWKNAAEAVNDPRFWELVSEERELHLQGKCSTCIYNMMGKREKKPAEFGRAKGSRAIWYMWLGARFLEFEALGFLNEDHWFSRDNSKGGVEGMGLQYLGYVVEDVWKKGNGIMYADDTAGWDTRITEADLEDEQYLLEKMSGTHKKLAWAITELTYKNKVVKVPRPGPGGKILMDVIARRDQRGSGQVVTYPLNTGTNLKTQLIRMAEGEGIITPEDTLQLSHKNEKNLREWLCTHGAERLGRMAVSGDDCIVAPIDERFGNALSHLNAMSKIRKDIDDWEPSKPWMKWEEVPFCSHHFHHLLLKDGRRIIVPCRNQDELIGRARVSPGNGWMIKETACHSKSYGQMWLLMYFHRRDLRLMANAISSCVPINWVPTGRTTWSLHAGGEWMTSEDMLEVWNRVWILDNPHMSDKSVILEWRDVPYLAKSDDIRCGSLIGTSQRACWAANIRSVVEKIRHLVGDEKYKDYLHSMDRYALEHSEIGCLI

SEQ ID NO: 8 - protein, 3433 aa, West Nile virus KUNV subtype
MSKKPGGPGKSRAVNMLKRGMPRVLSLTGLKRAMLSLIDGRGPTRFVLALLAFFRFTAIAPTRAVLDRWRSVNKQTAMKHLLSFKKELGTLTSAINRRSSKQKKRGGKTGIAFMIGLIAGVGAVTLSNFQGKVMMTVNATDVTDIITIPTAAGKNLCIVRAMDVGHMCDDTITYECPVLSAGNDPEDIDCWCTKLAVYVRYGRCTKTRHSRRSRRSLTVQTHGESTLSNKKGAWMDSTKATRYLVKTESWILRNPGYALVAAVIGWMLGSNTMQRVVFAVLLLLVAPAYSFNCLGMSNRDFLEGVSGATWVDLVLEGDSCVTIMSKDKPTIDVKMMNMEAANLAEVRSYCYLATVSELSTKAACPTMGEAHNDKRADPSFVCKQGVVDRGWGNGCGLFGKGSIDTCAKFACSTKATGRTILKENIKYEVAIFVHGPTTVESHGNYFTQTGAAQAGRFSITPAAPSYTLKLGEYGEVTVDCEPRSGIDTSAYYVMTVGTKTFLVHREWFMDLNLPWSSAESNVWRNRETLMEFEEPHATKQSVIALGSQEGALHQALAGAIPVEFSSNTVKLTSGHLKCRVKMEKLQLKGTTYGVCSKAFRFLGTPADTGHGTVVLELQYTGTDGPCKIPISSVASLNDLTPVGRLVTVNPFVSVSTANAKVLIELEPPFGDSYIVVGRGEQQINHHWHKSGSSIGKAFTATLKGAQRLAALGDTAWDFGSVGGVFTSVGKAVHQVFGGAFRSLFGGMSWITQGLLGALLLWMGINARDRSIALTFLAVGGVLLFLSVNVHADTGCAIDISRQELRCGSGVFIHNDVEAWMDRYKYYPETPQGLAKIIQKAHKEGVCGLRSVSRLEHQMWEAVKDELNTLLKENGVDLSIVVEKQEGMYKSAPRRLTATTEKLEIGWKAWGKSILFAPELANNTFVIDGPETKECPTQNRAWNSLEVEDFGFGLTSTRMFLRVRESNTTECDSKIIGTAVKNNLAIHSDLSYWIESRFNDTWKLERAVLGEVKSCTWPETHTLWGDGVLESDLIIPITLAGLRSNHNRRPGYKTQSQGPWDEGRVEIDFDYCPGTTVTLSESCGHRGPATRTTTESGKLITDWCCRSCTLPPLRYQTDNGCWYGMEIRPQRHDEKTLVQSQVNAYNADMIDPFQLGLLVVFLATQEVLRKRWTAKISMPAILIALLVLVFGGITYTDVLRYVILVGAAFAESNSGGDVVHLALMATFKIQPVFMVASFLKARWTNQENILLMLAAAFFQMAYYDARQILLWEMPDVLNSLAVAWMILRAITFTTTSNVVVPLLALLTPGLRCLNLDVYRILLLMVGIGSLIREKRSAAAKKKGASLLCLALASTGFFNPMILAAGLVACDPNRKRGWPATEVMTAVGLMFAIVGGLAELDIDSMAIPMTIAGLMFAAFVISGKSTDMWIERTADISWEGDAEITGSSERVDVRLDDDGNFQLMNDPGAPWKIWMLRMACLAISAYTPWAILPSVVGFWITLQYTKRGGVLWDTPSPKEYKRGDTTTGVYRIMTRGLLGSYQAGAGVMVEGVFHTLWHTTKGAALMSGEGRLDPYWGSVKEDRLCYGGPWKLQHKWNGQDEVQMIVVEPGKNVKNVQTKPGVFKTPEGEIGAVTLDFPTGTSGSPIVDKNGDVIGLYGNGVIMPNGSYISAIVQGERMDEPVPAGFEPEMLRKKQITVLDLHPGAGKTRRILPQIIKEAINRRLRTAVLAPTRVVAAEMAEALRGLPIRYQTSAVAREHNGNEIVDVMCHATLTHRLMSPHRVPNYNLFVMDEAHFTDPASIAARGYISTRVELGEAAAIFMTATPPGTSDPFPESNAPISDLQTEIPDRAWNSGYEWITEYIGKTVWFVPSVKMGNEIALCLQRAGKKVIQLNRKSYETEYPKCKNDDWDFVVTTDISEMGANFKASRVIDSRKSVKPTIITEGEGRVILGEPSAVTAASAAQRRGRIGRNPSQVGDEYCYGGHTNEDDSNCAHWTEARIMLDNINMPNGLIAQFYQPEREKVYTMDGEYRLRGEERKNFLELLRTADLPVWLAYKVAAAGVSYHDRRWCFDGPRTNTILEDNNEVEVITKLGERKILRPRWIDARVYSDHQALKSFKDFASGKRSQIGFIEVLGKMPEHFMGKTWEALDTMYVVATAEKGGRAHRMALEELPDALQTIALIALLSVMTMGVFFLLMQRKGIGKIGLGGVVLGAATFFCWMAEVPGTKIAGMLLLSLLLMIVLIPEPEKQRSQTDNQLAVFLICVLTLVGAVAANEMGWLDKTKSDISGLFGQRIETKENFSIGEFLLDLRPATAWSLYAVTTAVLTPLLKHLITSDYINTSLTSINVQASALFTLARGFPFVDVGVSALLLAAGCWGQVTLTVTVTSATLLFCHYAYMVPGWQAEAMRSAQRRTAAGIMKNAVVDGIVATDVPELERTTPIMQKKVGQVMLILVSLAALVVNPSVKTVREAGILITAAAVTLWENGASSVWNATTAIGLCHIMRGGWLSCLSITWTLVKNMEKPGLKRGGAKGRTLGEVWKERLNQMTKEEFIRYRKEAITEVDRSAAKHARKERNITGGHPVSRGTAKLRWLVERRFLEPVGKVIDLGCGRGGWCYYMATQKRVQEVRGYTKGGPGHEEPQLVQSYGWNIVTMKSGVDVFYRPSECCDTLLCDIGESSSSAEVEEHRTLRVLEMVEDWLHRGPKEFCVKVLCPYMPKVIEKMELLQRRYGGGLVRNPLSRNSTHEMYWVSRASGNVVHSVNMTSQVLLGRMEKKTWKGPQYEEDVNLGSGTRAVGKPLLNSDTSKIKNRIERLRREYSSTWHHDENHPYRTWNYHGSYEVKPTGSASSLVNGVVRLLSKPWDTITNVTTMAMTDTTPFGQQRVFKEKVDTKAPEPPEGVKYVLNETTNWLWAFLAREKRPRMCSREEFIRKVNSNAALGAMFEEQNQWRSAREAVEDPKFWEMVDEEREAHLRGECHTCIYNMMGKREKKPGEFGKAKGSRAIWFMWLGARFLEFEALGFLNEDHWLGRKNSGGGVEGLGLQKLGYILREVGTRPGGRIYADDTAGWDTRITRADLENEAKVLELLDGEHRRLARAIIELTYRHKVVKVMRPAADGRTVMDVISREDQRGSGQVVTYALNTFTNLAVQLVRMMEGEGVIGPDDVEKLTKGKGPKVRTWLSENGEERLSRMAVSGDDCVVKPLDDRFATSLHFLNAMSKVRKDIQEWKPSTGWYDWQQVPFCSNHFTELIMKDGRTLVTPCRGQDELVGRARISPGAGWNVRDTACLAKSYAQMWLLLYFHRRDLRLMANAICSAVPVNWVPTGRTTWSIHAGGEWMTTEDMLEVWNRVWIEENEWMEDKTPVEKWSDVPYSGKREDIWCGSLIGTRARATWAENIQVAINQVRSIIGDEKYVDYMSSLKRYEDTTLVEDTVL

SEQ ID NO: 9 - protein, 3423 aa, Zika virus
MKNPKKKSGGFRIVNMLKRGVARVSPFGGLKRLPAGLLLGHGPIRMVLAILAFLRFTAIKPSLGLINRWGSVGKKEAMEIIKKFKKDLAAMLRIINARKEKKRRGADTSVGIVGLLLTTAMAAEVTRRGSAYYMYLDRNDAGEAISFPTTLGMNKCYIQIMDLGHMCDATMSYECPMLDEGVEPDDVDCWCNTTSTWVVYGTCHHKKGEARRSRRAVTLPSHSTRKLQTRSQTWLESREYTKHLIRVENWIFRNPGFALAAAAIAWLLGSSTSQKVIYLVMILLIAPAYSIRCIGVSNRDFVEGMSGGTWVDVVLEHGGCVTVMAQDKPTVDIELVTTTVSNMAEVRSYCYEASISDMASDSRCPTQGEAYLDKQSDTQYVCKRTLVDRGWGNGCGLFGKGSLVTCAKFACSKKMTGKSIQPENLEYRIMLSVHGSQHSGMIVNDTGHETDENRAKVEITPNSPRAEATLGGFGSLGLDCEPRTGLDFSDLYYLTMNNKHWLVHKEWFHDIPLPWHAGADTGTPHWNNKEALVEFKDAHAKRQTVVVLGSQEGAVHTALAGALEAEMDGAKGRLSSGHLKCRLKMDKLRLKGVSYSLCTAAFTFTKIPAETLHGTVTVEVQYAGTDGPCKVPAQMAVDMQTLTPVGRLITANPVITESTENSKMMLELDPPFGDSYIVIGVGEKKITHHWHRSGSTIGKAFEATVRGAKRMAVLGDTAWDFGSVGGALNSLGKGIHQIFGAAFKSLFGGMSWFSQILIGTLLMWLGLNTKNGSISLMCLALGGVLIFLSTAVSADVGCSVDFSKKETRCGTGVFVYNDVEAWRDRYKYHPDSPRRLAAAVKQAWEDGICGISSVSRMENIMWRSVEGELNAILEENGVQLTVVVGSVKNPMWRGPQRLPVPVNELPHGWKAWGKSYFVRAAKTNNSFVVDGDTLKECPLEHRAWNSFLVEDHGFGVFHTSVWLKVREDYSLECDPAVIGTAVKGKEAVHSDLGYWIESEKNDTWRLKRAHLIEMKTCEWPKSHTLWADGIEESDLIIPKSLAGPLSHHNTREGYRTQMKGPWHSEELEIRFEECPGTKVHVEETCGTRGPSLRSTTASGRVIEEWCCRECTMPPLSFRAKDGCWYGMEIRPRKEPESNLVRSVVTAGSTDHMDHFSLGVLVILLMVQEGLKKRMTTKIIISTSMAVLVAMILGGFSMSDLAKLAILMGATFAEMNTGGDVAHLALIAAFKVRPALLVSFIFRANWTPRESMLLALASCLLQTAISALEGDLMVLINGFALAWLAIRAMVVPRTDNITLAILAALTPLARGTLLVAWRAGLATCGGFMLLSLKGKGSVKKNLPFVMALGLTAVRLVDPINVVGLLLLTRSGKRSWPPSEVLTAVGLICALAGGFAKADIEMAGPMAAVGLLIVSYVVSGKSVDMYIERAGDITWEKDAEVTGNSPRLDVALDESGDFSLVEDDGPPMREIILKVVLMTICGMNPIAIPFAAGAWYVYVKTGKRSGALWDVPAPKEVKKGETTDGVYRVMTRRLLGSTQVGVGVMQEGVFHTMWHVTKGSALRSGEGRLDPYWGDVKQDLVSYCGPWKLDAAWDGHSEVQLLAVPPGERARNIQTLPGIFKTKDGDIGAVALDYPAGTSGSPILDKCGRVIGLYGNGVVIKNGSYVSAITQGRREEETPVECFEPSMLKKKQLTVLDLHPGAGKTRRVLPEIVREAIKTRLRTVILAPTRVVAAEMEEALRGLPVRYMTTAVNVTHSGTEIVDLMCHATFTSRLLQPIRVPNYNLYIMDEAHFTDPSSIAARGYISTRVEMGEAAAIFMTATPPGTRDAFPDSNSPIMDTEVEVPERAWSSGFDWVTDHSGKTVWFVPSVRNGNEIAACLTKAGKRVIQLSRKTFETEFQKTKHQEWDFVVTTDISEMGANFKADRVIDSRRCLKPVILDGERVILAGPMPVTHASAAQRRGRIGRNPNKPGDEYLYGGGCAETDEDHAHWLEARMLLDNIYLQDGLIASLYRPEADKVAAIEGEFKLRTEQRKTFVELMKRGDLPVWLAYQVASAGITYTDRRWCFDGTTNNTIMEDSVPAEVWTRHGEKRVLKPRWMDARVCSDHAALKSFKEFAAGKRGAAFGVMEALGTLPGHMTERFQEAIDNLAVLMRAETGSRPYKAAAAQLPETLETIMLLGLLGTVSLGIFFVLMRNKGIGKMGFGMVTLGASAWLMWLSEIEPARIACVLIVVFLLLVVLIPEPEKQRSPQDNQMAIIIMVAVGLLGLITANELGWLERTKSDLSHLMGRREEGATIGFSMDIDLRPASAWAIYAALTTFITPAVQHAVTTSYNNYSLMAMATQAGVLFGMGKGMPFYAWDFGVPLLMIGCYSQLTPLTLIVAIILLVAHYMYLIPGLQAAAARAAQKRTAAGIMKNPVVDGIVVTDIDTMTIDPQVEKKMGQVLLIAVAVSSAILSRTAWGWGEAGALITAATSTLWEGSPNKYWNSSTATSLCNIFRGSYLAGASLIYIVTRNAGLVKRRGGGTGETLGEKWKARLNQMSALEFYSYKKSGITEVCREEARRALKDGVATGGHAVSRGSAKLRWLVERGYLQPYGKVIDLGCGRGGWSYYAATIRKVQEVKGYTKGGPGHEEPVLVQSYGWNIVRLKSGVDVFHMAAEPCDTLLCDIGESSSSPEVEEARTLRVLSMVGDWLEKRPGAFCIKVLCPYTSTMMETLERLQRRYGGGLVRVPLSRNSTHEMYWVSGAKSNTIKSVSTTSQLLLGRMDGPRRPVKYEEDVNLGSGTRAVVSCAEAPNMKIIGNRIERIRSEHAETWFFDENHPYRTWAYHGSYEAPTQGSASSLINGVVRLLSKPWDVVTGVTGIAMTDTTPYGQQRVFKEKVDTRVPDPQEGTRQVMSMVSSWLWKELGKHKRPRVCTKEEFINKVRSNAALGAIFEEEKEWKTAVEAVNDPRFWALVDKEREHHLRGECQSCVYNMMGKREKKQGEFGKAKGSRAIWYMWLGARFLEFEALGFLNEDHWMGRENSGGGVEGLGLQRLGYVLEEMSRIPGGRMYADDTAGWDTRISRFDLENEALITNQMEKGHRALALAIIKYTYQNKVVKVLRPAEKGKTVMDIISRQDQRGSGQVVTYALNTFTNLVVQLIRNMEAEEVLEMQDLWLLRRSEKVTNWLQSNGWDRLKRMAVSGDDCVVKPIDDRFAHALRFLNDMGKVRKDTQEWKPSTGWDNWEEVPFCSHHFNKLHLKDGRSIVVPCRHQDELIGRARVSPGAGWSIRETACLAKSYAQMWQLLYFHRRDLRLMANAICSSVPVDWVPTGRTTWSIHGKGEWMTTEDMLVVWNRVWIEENDHMEDKTPVTKWTDIPYLGKREDLWCGSLIGHRPRTTWAENIKNTVNMVRRIIGDEEKYMDYLSTQVRYLGEEGSTPGVL

SEQ ID NO: 10 - protein, 3391 aa, Dengue virus type 2
MNNQRKKARNTPFNMLKRERNRVSTVQQLTKRFSLGMLQGRGPLKLFMALVAFLRFLTIPPTAGILKRWGTIKKSKAINVLRGFRKEIGRMLNILNRRRRTAGMIIMLIPTVMAFHLTTRNGEPHMIVSRQEKGKSLLFKTKDGTNMCTLMAMDLGELCEDTITYKCPFLKQNEPEDIDCWCNSTSTWVTYGTCTTTGEHRREKRSVALVPHVGMGLETRTETWMSSEGAWKHAQRIETWILRHPGFTIMAAILAYTIGTTHFQRVLIFILLTAIAPSMTMRCIGISNRDFVEGVSGGSWVDIVLEHGSCVTTMAKNKPTLDFELIKTEAKQPATLRKYCIEAKLTNTTTDSRCPTQGEPTLNEEQDKRFVCKHSMVDRGWGNGCGLFGKGGIVTCAMFTCKKNMEGKIVQPENLEYTVVITPHSGEEHAVGNDTGKHGKEVKITPQSSITEAELTGYGTVTMECSPRTGLDFNEMVLLQMKDKAWLVHRQWFLDLPLPWLPGADTQGSNWIQKETLVTFKNPHAKKQDVVVLGSQEGAMHTALTGATEIQMSSGNLLFTGHLKCRLRMDKLQLKGMSYSMCTGKFKIVKEIAETQHGTIVIRVQYEGDGSPCKIPFEIMDLEKRHVLGRLITVNPIVTEKDSPVNIEAEPPFGDSYIIIGVEPGQLKLDWFKKGSSIGQMFETTMRGAKRMAILGDTAWDFGSLGGVFTSIGKALHQVFGAIYGAAFSGVSWTMKILIGVIITWIGMNSRSTSLSVSLVLVGIVTLYLGVMVQADSGCVVSWKNKELKCGSGIFVTDNVHTWTEQYKFQPESPSKLASAIQKAHEEGICGIRSVTRLENLMWKQITSELNHILSENEVKLTIMTGDIKGIMQVGKRSLRPQPTELRYSWKTWGKAKTLSTELHNQTFLIDGPETAECPNTNRAWNSLEVEDYGFGVFTTNIWLRLREKQDVFCDSKLMSAAIKDNRAVHADMGYWIESALNDTWKIEKASFIEVKSCHWPKSHTLWSNGVLESEMVIPKNFAGPVSQHNNRPGYHTQTAGPWHLGKLEMDFDFCEGTTVVVTEDCGNRGPSLRTTTASGKLITEWCCRSCTLPPLRYRGEDGCWYGMEIRPLKEKEENLVSSLVTAGHGQIDNFSLGILGMALFLEEMLRTRVGTKHAILLVAVSFVTLITGNMSFRDLGRVMVMVGATMTDDIGMGVTYLALLAAFKVRPTFTAGLLLRKLTSKELMMTTIGIVLLSQSSIPETILELTDALALGMMVLKMVRNMEKYQLAVTIMAILCVPNAVILQNAWKVSCTILAVVSVSPLLLTSSQQKADWIPLALTIKGLNPTAIFLTTLSRTSKKRSWPLNEAIMAVGMVSILASSLLKNDIPMTGPLVAGGLLTVCYVLTGRSADLELERATDVKWDDQAEISGSSPILSITISEDGSMSIKNEEEEQTLTILIRTGLLVISGLFPVSIPITAAAWYLWEVKKQRAGVLWDVPSPPPVGKAELEDGAYRIKQKGILGYSQIGAGVYKEGTFHTMWHVTRGAVLMHKGKRIEPSWADVKKDLISYGGGWKLEGEWKEGEEVQVLALEPGKNPRAVQTKPGLFRTNTGTIGAVSLDFSPGTSGSPIVDKKGKVVGLYGNGVVTRSGAYVSAIAQTEKSIEDNPEIEDDIFRKRRLTIMDLHPGAGKTKRYLPAIVREAIKRGLRTLILAPTRVVAAEMEEALRGLPIRYQTPAIRAEHTGREIVDLMCHATFTMRLLSPIRVPNYNLIIMDEAHFTDPASIAARGYISTRVEMGEAAGIFMTATPPGSRDPFPQSNAPIMDEEREIPERSWNSGHEWVTDFKGKTVWFVPSIKTGNDIAACLRKNGKRVIQLSRKTFDSEYVKTRTNDWDFVVTTDISEMGANFKAERVIDPRRCMKPVILTDGEERVILAGPMPVTHSSAAQRRGRIGRNPRNENDQYIYMGEPLENDEDCAHWKEAKMLLDNINTPEGIIPSMFEPEREKVDAIDGEYRLRGEARKTFVDLMRRGDLPVWLAYKVAAEGINYADRRWCFDGTRNNQILEENVEVEIWTKEGERKKLKPRWLDARIYSDPLALKEFKEFAAGRKSLTLNLITEMGRLPTFMTQKARDALDNLAVLHTAEAGGKAYNHALSELPETLETLLLLTLLATVTGGIFLFLMSGRGIGKMTLGMCCIITASILLWYAQIQPHWIAASIILEFFLIVLLIPEPEKQRTPQDNQLTYVIIAILTVVAATMANEMGFLEKTKKDLGLGNIATQQPESNILDIDLRPASAWTLYAVATTFITPMLRHSIENSSVNVSLTAIANQATVLMGLGKGWPLSKMDIGVPLLAIGCYSQVNPITLTAALLLLVAHYAIIGPGLQAKATREAQKRAAAGIMKNPTVDGITVIDLDPIPYDPKFEKQLGQVMLLVLCVTQVLMMRTTWALCEALTLATGPVSTLWEGNPGRFWNTTIAVSMANIFRGSYLAGAGLLFSIMKNTTSTRRGTGNIGETLGEKWKSRLNALGKSEFQIYKKSGIQEVDRTLAKEGIKRGETDHHAVSRGSAKLRWFVERNLVTPEGKVVDLGCGRGGWSYYCGGLKNVREVKGLTKGGPGHEEPIPMSTYGWNLVRLQSGVDVFFVPPEKCDTLLCDIGESSPNPTVEAGRTLRVLNLVENWLNNNTQFCVKVLNPYMPSVIERMETLQRKYGGALVRNPLSRNSTHEMYWVSNASGNIVSSVNMISRMLINRFTMRHKKATYEPDVDLGSGTRNIGIESETPNLDIIGKRIEKIKQEHETSWHYDQDHPYKTWAYHGSYETKQTGSASSMVNGVVRLLTKPWDVVPMVTQMAMTDTTPFGQQRVFKEKVDTRTQEPKEGTKKLMKITAEWLWKELGKKKTPRMCTREEFTKKVRSNAALGAIFTDENKWKSAREAVEDSRFWELVDKERNLHLEGKCETCVYNMMGKREKKLGEFGKAKGSRAIWYMWLGARFLEFEALGFLNEDHWFSRENSLSGVEGEGLHKLGYILREVSKKEGGAMYADDTAGWDTRITIEDLKNEEMITNHMAGEHKKLAEAIFKLTYQNKVVRVQRPTPRGTVMDIISRRDQRGSGQVGTYGLNTFTNMEAQLIRQMEGEGIFKNIQHLTASEEIAVQDWLVRVGRERLSRMAISGDDCVVKPLDDRFARALTALNDMGKVRKDIQQWEPSRGWNDWTQVPFCSHHFHELIMKDGRTLVVPCRNQDELIGRARISQGAGWSLRETACLGKSYAQMWSLMYFHRRDLRLAANAICSAVPSHWVPTSRTTWSIHASHEWMTTEDMLTVWNKVWILENPWMEDKTPVESWEEIPYLGKREDQWCGSLIGLTSRATWAKNIQTAINQVRSLIGNEEYTDYMPSMKRFRREEEEAGVLW

SEQ ID NO: 11 - DNA, 11978 bp, Artificial Sequence
  Synthetic
gggtcggcatggcatctccacctcctcgcggtccgacctgggcatccgaaggaggacgtcgtccactcggatggctaagggagagccacttttctctcgattctctatcggaatctagggagctcggatccagacatgataagatacattgatgagtttggacaaaccacaactagaatgcagtgaaaaaaatgctttatttgtgaaatttgtgatgctattgctttatttgtaaccattataagctgcaataaacaagttaacaacaacaattgctcgagggggggcccggtaccttgaagctgtccctgatggtcgtcatctacctgcctggacagcatggcctgcaacgcgggcatcccgatgccgccggaagcgagaagaatcataatggggaaggccatccagcctcgcgtcggcgcttaaggatcatgatgataaacaatgtatggtgctaatgttgcttcaacaacaattctgttgaactgtgttttcatgtttgccaacaagcacctttatactcggtggcctccccaccaccaacttttttgcactgcaaaaaaacacgcttttgcacgcgggcccatacatagtacaaactctacgtttcgtagactattttacataaatagtctacaccgttgtatacgctccaaatacactaccacacattgaacctttttgcagtgcaaaaaagtacgtgtcggcagtcacgtaggccggccttatcgggtcgcgtcctgtcacgtacgaatcacattatcggaccggacgagtgttgtcttatcgtgacaggacgccagcttcctgtgttgctaaccgcagccggacgcaactccttatcggaacaggacgcgcctccatatcagccgcgcgttatctcatgcgcgtgaccggacacgaggcgcccgtcccgcttatcgcgcctataaatacagcccgcaacgatctggtaaacagttttaaaaaacttttgcgttagtaaaaccacggagttttggtttgctgagaatagtgcgagggttgttttaattatttcggagattttggttcgtgatgaatcaggagagaggaatactcaggggtatggggaggttcccccccccccctgtgaagaaggggaacaagaattctgttgccgtggccagggtgccaccgcagcaaggaggaaaagcgagagagaaaaaccgtgagaggattaaagcgccaggagcgcgacatggagttgccggaaagatgaaaagtctaatgggagaattgggctttggatggattgatttactacgcgttgatttggtggaaggaattatgatgatggtttttgttatacagcgggctttcgcccaagtgcaccggagaattagaggattatcaagacgcgtcagggcattggagaagaagcgtgacggtcgagcggctatgttcatttggactatattggcaatgttattcggagttatgggagtcactctctccaactttcaagggaaggtgatgatgacggtgaacgctactgacgtcacagacattatcacgataccaacggccgctggaaagaacctgtgcattgtcagagctatggatgtggggcacatgtgtgatgatactatcacctatgaatgtccagtgttgtcggccggaaatgatccagaagacattgactgctggtgcacgaagttagcagtctacgttaggtatggaagatgcaccaagacacgacactcaagacgcagcagaaggtcactaacagtgcagacgcatggagagagcaccctatcgaacaaaaagggggcctggatggacagcaccaaggctacaaggtacttggtaaaaacagaatcatggatcttgagaaaccctggatatgccttggtggcagctgtcattggatggatgctcggaagcaacaccatgcagcgtgtcgtgtttgccgtgttactgcttttggtagctccagcttacagctttaactgtcttggaatgagcaacagagatttcctggagggagtgtccggagcaacatgggtggacttggtccttgaaggtgacagctgtgtgaccattatgtccaaggacaagcccaccatcgatgtgaagatgatgaacatggaggccgctaacttagcagaagtccgcagttattgctacttagccactgtcagtgaactctccaccaaggctgcgtgcccaaccatgggggaagcccataatgacaagcgggctgacccatcttttgtgtgcaaacaaggagtagtggatagaggttggggcaatgggtgcggactttttggtaaaggaagcatcgacacatgcgccaaatttgcctgttcaaccaaggcaacgggaaggactatcttaaaggagaacattaagtatgaggtggctatctttgtgcatggaccaactaccgtggaatcgcatgggaactacttcacgcaaaccggagctgctcaggctgggagatttagtatcacccccgcggcaccctcttacactcttaagctcggagagtatggagaagtaacagtggactgtgaaccacgctcagggatagacaccagtgcatactatgtgatgactgtcgggacaaagactttcttggtccaccgtgagtggtttatggacctcaacctcccctggagcagtgctgaaagtaatgtttggaggaacagagagacgctaatggagtttgaagaaccacacgctacgaagcaatctgtgatagcattgggctctcaagagggagccctgcatcaagctctggcaggagccattcctgtggaattttcaagcaacactgtcaagctgacgtcaggccacctgaagtgtagggtgaagatggaaaaattgcagctgaaggggacaacttatggcgtctgttcaaaggccttcagattccttgggactcccgcagacacgggccatggtactgtggtactggaactgcagtacacaggcacggatggaccctgcaagatacccatttcatcagtagcttcattgaatgacctaacgccagtgggcaggttagttaccgtcaacccctttgtctccgtgtcaacggccaatgctaaagtcctgattgagttggaaccaccctttggagattcgtacatagtggtgggaagaggagagcaacagatcaaccatcactggcacaagtctggaagtagcattggcaaagctttcacagccaccctcaagggagctcagagactagcagctctgggagacacagcttgggactttggatcggttggaggagtgtttacctccgtgggaaaggctgtccatcaagtatttggtggagcattccgctcattgtttggaggcatgtcttggataactcagggtctgctgggggccctcctattgtggatgggtattaacgctcgtgatagatccatagccctcacgttcctcgcggttggaggagttctgctctttctctccgtgaacgtgcatgctgacttcggatgtggatttgacccagataggaaggtagcacagtgtggttctggctcattcgtgtggaagtcactggcccgttggccaatggctgatcacgctattgagtttgaagatagcaaagtgatggtgacttacttgactgacctattgatgagaaagaacaaagtctgcatagtgtgtgaagatgtattgcagtgtgccgcagcgcgtggagttgtcgagcagataacgtcgatcaatggaatcccaatccatcacaacatgtcgctgtcgcatggccgatatttcccacgtgtagtgaagaaagtacacaatgttaaggtgggaaaagccatgttgcgccttgcaatggccacatatgcgggagcgatgcctgagagtggattgggtgttttgaagacggggtatttttcacgcggagaagtgcaggaaacgtgggatgataaagttctaagagtcctaaccagcgccataaatgcagaggaagtgtgccagacggctgtcacgttccagtatgagttcgttcgatataaccggaaagtctttggatctaacatcgtgttgcgaccttcagcctttacgagcaaagcttgcccaacatatttagctggggctgtggtcaaaaacgacatagcaacgtttacggacggaatgatgtggatgcggagccggaaagtcaatgaaacgtgggaactgtttgagttggaaacaacccaaagccaccaatgcatttggccatacgcgtacacaatagacctagcaacacccacggacaagaggcttttcatgccgccacaatacggaggaccaatttcgtttgcgaaccacgtgcctggattccaggtgcaagaggactttccctggcagaaggcgaatatattaatgcgccagggaccggttccgggaacgaccgtagtccaggatccacactgtgatgaccggagcgcggcagtgccagttgaaccaactatgcaagcttggtgctgcaagacctgttttgatagaggagtgaagcctttccattttgtggttgacgggaaatttttctatccaatggaagtgcggccaatgaaactggaacaagacgctgtggtgattgagactgatgatggagagttcgagaggagtgagcatgagagcttgtttgaaggcaaagcaaagtggacatcaccgttaccaatgggagaaacagccaagattcaaaattttttcgtgaccagcccgccaaagccggaatcaagcctgcttttggtgggcgttctgattcatatgttaacaacgcgaacccgccatcggtgggcaactcgttgtgctggaacttggctcatctttttggtctttggacatccggttgtgtcttcggtgcagtcttgggcgtggctctttatgtcagctgccttagcaagtgtccctggtggttcttcactggtgatccacttctggattgggttgcagatatcgtcagcgcacctcttttacctgggttggttaatgaggaaacgcctgttgattacagagatgtcgcgagtggcacatctgattgcccagttgtgcagcttcgagacatatgcgtgggcaccgatcctcaaagtactggatcacttgctgtttccactctacactctgtcagtattcgtcgttcaccagcagtttcaggtattccacgacttgtggctacagagcgccgtggtgatggcacacctgttgcaacaccctctcagtggtttaataaccttgagtttaagcgtcggcttgattcagctaatagcaccaatgaaaagatggttttgctcaccagttatatggggagatggcttacgcgcgccgagaccacactggacagccttaacgtatttcatcgtgctgtatttggcagccgctgggatggagacagtgggtctgcacacgtccgggatgacagtgatgctgggcgggatgcttctgtgggttgtcctacagttgatgcccccgacagccttggaacttgtgcgcctaccgggacaaagtctgccagacggatgtgaagaagaagcgtcaacatctctaccagaaggaatgagtgggcattacgcccccgatggagttgaactcgtgaactacacagatgcagggactgtctccgcaaaccttgtggtatttgttgggtgtgctggaattatgactatgaacatatacgttgggttggttatcacggccttggcctgggtaacggacgccccgatgtggattccaagattgattgatggtgctatgtcccagcgggcaaattcggagctattgctgccatccccacctcttgagatacacaagacggaagactcgtttggttacatcccggacggaacatatcacgtgttggctagcagctggatgagcaagaaaccagttggtgttggagtggtgaaggagggcgtgtttcacacgttacaccacgtcaccaaaggagctaatgtgacatgggcaggacgtgaggttaggatgcactctggagatgttaggcgggatattgctgcctatggcgggccctggaacatcagcgggagtcttgaagatgtcgtagtagtgaaggccgtgaacaaggatggaaccgtgacatgctgccggattacaacagctaagttggacattgaaggaactacagtgatggctgttgagcgagattttggtttcggctcttcggggtcccccatatacgctcctgatggacggttgattggcttgtatggatacgggttttactatggaacgtacttctcaatagtttcaacaggagaaggagtggaggcaccaccggaagaggttgaagtctcaacacgtgagtttgtggactggcaccctggaagaggaaaaacgcgcacgatactcgttgagcaggccctgaagcatatagctgatggaaagaggttgctaattttgacaccaacgcgggtcgtaaaggatgaagtgcagcgagcgataaaggaagccgccccgcaggcggttatcggatcgaacttaagcatttttcggaagaacgccgttaccttggcatgccacgcgaccttcacgcagtatgtgatggagaaggggatagaaagtgtgaagttttcgaccatcattatggacgagtgccactttctggacccgatgtccatcgcgtgccgcgggataatggatttccacaacagccgtggaacgaaggtcatcttcatgagtgcgacgcccccaggacgagcaggaaacgctgggtccaactttacaatagaagacagagccatcaagttccccaaggagttgaccgcatcgtggatcaaagacaagtcaataggcaagaccatcgtttttgtgccaacaattacgcaagctgtgaggctggctaaagagttgggaggggtggccttgacccgagatacgttcaatgatgccatggggaaggcccggagtccggaaacaatgtttataatctcaacagacatcagcgagatgggagccaatctcggagtgactactgttatcgacacaagaactgttataaaaccattagtgtctgacaaaggagtttcacttgaaagggttggtgtgaccccagcttcaatcatccagcgcaggggccgagtaggtcggcgggagcccggagtatacatttatccccttgacgtcgaaccagaggagcagccggaaaattgggtgtgttgggtggaggcgcaaatgatcttagatcaattgggctgccatccgatgagagaggagagcgaatttttccgcccacaaggcacgtaccggattgacgacgtagagcagcggaggtttctggggttgatcaaggaaaaactgccaatttggcttgcttggacttgggccagctcacatgcgaacaaacatcagatgctatttcagggaaacgcccccaacactggacgaacattaaaaataaagacgccatccggatctcacatttacgccccaaaggtgacagatgataggtttgaaaaggagccagaaattgtgaaagtggcggccatcggattcttcctaaagcagagatcactatacttcgacttacctggattattgaccggattgtacacggtgttgacaacggctgggctcgatgcccttggaaattcgttcaaacgctctgtggacacccttcacgacatcggaaatgcggtggaaggagagttttctgctatacaaatgggacggattttacagatgtggtctgcgttgtttatcggggtgactttgggagttgtgctgatgggagccggatttgttgtggtgaaggcttttagaggattgtttggaacccgccaacaacacacaactgtgtgcgtgtcggagggcggaagtttccaaaaagttgccacggttctaatgagcgttggaccattgtgcgccgtttttggtggcattccctctatattcgtcttcattgtgaccgttgccctgttgattgtgctgtgtgtgggcggaggtggctctcaacgtggtgtgcttgattcggatctaatacgctgggtcatggtgttggccatgatgacaatcggagtgactgcgtgggagttggagctattaccaaacgtgagaagagatgttatacagttgactcgatacctgtttgctagcaatcctgccgttgttggagctgtgtttaacgccgggaatatcggattgggagtctctctgccagggaccctcatgatgagctacgccgcgagcggaacgctggccccccttattggagcgtgggccgaaggaaatttcttaggaaagctctttggtagcgaagtgcttccagctcaggctataggcggatttcaagtgacagctatcccgtggggatctatggtgccggttatcgctggttgctttctagcgacaaacactctttcgaaagtgtttggtgctggaattacaactgtgtttctcatactactctacttcgacaagaaacatgcattcacgaacaaggctgttaaggttttgttggcgcggacaaacagaagggacatggaggaagaaatcacaacaagggacgcggagtcgcgggctcgccaactgttttatggcctacaactggccgtatcgttgctgtgggttctctcacatcctgtgttggaaaacttcgttccattctttgctgtgtgcgggtacacattcctgtcgctcttgaggccaaatcatcaactacatgctgcgttggattatacattggtagtcctgctcttgcaggtagttgaacctgggaacatcatgtacgtcggcggatgcgttttgttatggtatgttttaaaccctaccagattgggcgtgcgctcgctggtgaagagtgacaccggaggtttaggcttccgttggaagaaagcgttgaattcacttagtgagaggcagtttgccatctacaaagtcagaggcgtgaatgaaactgataaaggagcctacgtgtcgcgaggtggtttaaaaatgaacgagattatcaacaagcatgcgtgggaacctcgaggagttgtcgttgacctgggatgtggacgaggaggttggtcccagcgcttggtgatggattaccgcgtcgctgaagtaagaggatacacacttggaggcaaagaacgtgagaatccccaaccgttccaaacgaaaggatataacttggcgaatttgaaggctggagttgacgtctataaaatggagccagtgaattgtaacaccataatttgcgacataggtgagagtgacccgcgtcctgaagttgaaaaaactcgaacgctgaaggttttgggaatgctggagaaatggctggaagtcaatccaaacgcctctttttgctgcaaagtgctatcaccttatcacttggacgtgcttcgaaagttagagtcgctgcaacacaagtataacgggcggctggttcgactgtcttacagtcggaactcaacagcagaaatgtattatgtgtcaggaaagagggcaaacgtggtggcaagcgtgtacttcatgcttgggtcgctggtaggtaggctgcggagacatgagccatcaatcatcgaccccccaccggttctagagatgggaaccagaagcgatccgcgagcaaaggccaaagcgcaagacttcgagatgatccgaagaagagtggaacgactacgaggagaaaatcggaaaacatggtttgtggacaacgaacatccatatgtgtcatttaactaccatggatccttcgtgactgatgaggtgacagcgggcggacaaacaacaaatcccttgattagacgcgttatgtggccatgggactttctgtctcgggtgacaacctttatgatgaccgatgtttcaacgtatgcccaacaaaaggtgctgcgtgaaaaagtggacactgtctctgaggagcccgacgagcgaatgaaagcaattaacagactcatcatgacacacttcgtgaaaatgttcaagcggcgcgggctgaaaccgagggtgttgacaccacaagactacatgaataatgtccaagccaacgcagccataggaggatggagcgaagtaatggattggcaaaacgtgcgcgatgctttggcagatcaacgattctgggacatggtagataacgagagggccttacacttgcgtggtgactgtgagctttgcatctataacacgatgggaaagaaagaaaagaagccatctgcctttggcactgcgaaaggttcacgcaccatctggtatatgtggctgggtagccgttatttagagtacgaggctttaggattcttgaacgaagatcattgggttgcacgagaaaactttccatgtggagtcggtggcgtcggcgttaactattttggatattacctgaaggaaatagccgggggaggccggtggcttatcgcagacgatgtcgcgggatgggacacgagaataacccaaggagatctagatgatgagctgttcatgttaaccgagcttgccccaaccacataccacaagaaattgataactgcgacaatgacgttggcttataaaaacatagtggccttattccctagaaatcatccgatgtaccgaagtggaactgttcttgatgtgttgtctcgaacggatcagcgtgggtcgggccaggtgacaacatacgctttgaacactgtgactaatggaaagtgccaggtcgggagaacattagaagcgtgtggcttgctggacgccccgctcaccacaatcgactcctggctcactgccaacttggaacgagttcttggagcaatggtcgttgccggagatgatgtggtagtggcgacagacaatgaagaattccacacgagtttgagatacataacagcgacgtcaaagatccgaaagaacttaggggtgagtgagccatcgccgagattcacgagctgggaagatgttgagttttgctcacaccacttccatccactgacgttacgtgatggccgtgtgctgatcgccccgtgtcgtgaccaaaacgaaattatcggaagatcaagaatccagaaaggcggaatagttgacatggcctcggctgggtgcttagcgaaggctcacgcgcagatgtgggccctttacttcttccatcggcgagacttacggattggattcgcggccatcacatcaattgtgcctatcaactgggtgccgacgggcaggatatcatggtctatccaccagaacgcagagtggatgacgactgaggatatgctaacggtttggaacaacgtgtggattagggacaatccgtggatgagaggaaaagaacgagtgacttcatggacagacataccgtatttacccaaaggagtggacataaagtgcggaagcctaataggcgattccgaccgcgcttcctggtcaaagacgattcccctagttgtggagaagacccgaaaaatccttgagcaggagaggggaacattgaagttctacaatgggttatccattctaggacggtatgttcaccacgtcgatcctgtgttcaactgaagtgtgacgatgtaggcccgcgggagccttagaattcaagagcttgggaattctagaatcccgtttaccgcaggagggggtcatatggagcaggtggctatgtatagcctggctaaatgtatggctcctgggggagtgacgcccctccggttccagttcctgggtgaacaggtaaaaaccaccacgaagcgccgcttcaacatcgcaagggggagaaatcccgggtgctgacgccaccccgaccccagtcccacataaggctgtgacgaaagagccttaccggcacgaggagtgcccaccgcaaggaggagaaatcctgggcgttgacgacgccccggccccagtctctgataggtgaccagaaccatgtcaccccaaagtgttgaaaggacactgatcaccagaaatggtgagggcacacagggcttagcccaaggtgagtgacgacacctcccgaaatgtgtaaatagcagggtcagctctaagcagcaggcttccaccgttaggaagcgttgctgtgagcttacttggctacgtct

SEQ ID NO: 12 - DNA, 11990 bp, Artificial Sequence
  synthetic
gggtcggcatggcatctccacctcctcgcggtccgacctgggcatccgaaggaggacgtcgtccactcggatggctaagggagagccacttttctctcgattctctatcggaatctagggagctcggatccagacatgataagatacattgatgagtttggacaaaccacaactagaatgcagtgaaaaaaatgctttatttgtgaaatttgtgatgctattgctttatttgtaaccattataagctgcaataaacaagttaacaacaacaattgctcgagggggggcccggtaccttgaagctgtccctgatggtcgtcatctacctgcctggacagcatggcctgcaacgcgggcatcccgatgccgccggaagcgagaagaatcataatggggaaggccatccagcctcgcgtcggcgcttaaggatcatgatgataaacaatgtatggtgctaatgttgcttcaacaacaattctgttgaactgtgttttcatgtttgccaacaagcacctttatactcggtggcctccccaccaccaacttttttgcactgcaaaaaaacacgcttttgcacgcgggcccatacatagtacaaactctacgtttcgtagactattttacataaatagtctacaccgttgtatacgctccaaatacactaccacacattgaacctttttgcagtgcaaaaaagtacgtgtcggcagtcacgtaggccggccttatcgggtcgcgtcctgtcacgtacgaatcacattatcggaccggacgagtgttgtcttatcgtgacaggacgccagcttcctgtgttgctaaccgcagccggacgcaactccttatcggaacaggacgcgcctccatatcagccgcgcgttatctcatgcgcgtgaccggacacgaggcgcccgtcccgcttatcgcgcctataaatacagcccgcaacgatctggtaaacagttttaaaaaacttttgcgttagtaaaaccacggagttttggtttgctgagaatagtgcgagggttgttttaattatttcggagattttggttcgtgatgaatcaggagagaggaatactcaggggtatggggaggttcccccccccccctgtgaagaaggggaacaagaattctgttgccgtggccagggtgccaccgcagcaaggaggaaaagcgagagagaaaaaccgtgagaggattaaagcgccaggagcgcgacatggagttgccggaaagatgaaaagtctaatgggagaattgggctttggatggattgatttactacgcgttgatttggtggaaggaattatgatgatggtttttgttatacagcgggctttcgcccaagtgcaccggagaattagaggattatcaagacgcgtcagggcattggagaagaagcgtgacggtcgagcggctatgttcatttggactatattggcaatgttattcggagttatgggagcggaggtcactagacgtgggagtgcatactatatgtacttggacagaaacgatgctggggaggccatatcttttccaaccacattggggatgaataagtgttatatacagatcatggatcttggacacatgtgtgatgccaccatgagctatgaatgccctatgctggatgagggggtggaaccagatgacgtcgattgttggtgcaacacgacgtcaacttgggttgtgtacggaacctgccatcacaaaaaaggtgaagcacggagatctagaagagctgtgacgctcccctcccattccactaggaagctgcaaacgcggtcgcaaacctggttggaatcaagagaatacacaaagcacttgattagagtcgaaaattggatattcaggaaccctggcttcgcgttagcagcagctgccatcgcttggcttttgggaagctcaacgagccaaaaagtcatatacttggtcatgatactgctgattgccccggcatacagcatcaggtgcataggagtcagcaatagggactttgtggaaggtatgtcaggtgggacttgggttgatgttgtcttggaacatggaggttgtgtcaccgtaatggcacaggacaaaccgactgtcgacatagagctggttacaacaacagtcagcaacatggcggaggtaagatcctactgctatgaggcatcaatatcagacatggcttcggacagccgctgcccaacacaaggtgaagcctaccttgacaagcaatcagacactcaatatgtctgcaaaagaacgttagtggacagaggctggggaaatggatgtggactttttggcaaagggagcctggtgacatgcgctaagtttgcatgctccaagaaaatgaccgggaagagcatccagccagagaatctggagtaccggataatgctgtcagttcatggctcccagcacagtgggatgatcgttaatgacacaggacatgaaactgatgagaatagagcgaaggttgagataacgcccaattcaccaagagccgaagccaccctggggggttttggaagcctaggacttgattgtgaaccgaggacaggccttgacttttcagatttgtattacttgactatgaataacaagcactggttggtccacaaggagtggttccacgacattccattaccttggcacgctggggcagacaccggaactccacactggaacaacaaagaagcactggtagagttcaaggacgcacatgccaaaaggcaaactgtcgtggttctagggagtcaagaaggagcagttcacacggcccttgctggagctctggaggctgagatggatggtgcaaagggaaggctgtcctctggccacttgaaatgtcgcctgaaaatggataaacttagattgaagggcgtgtcatactccttgtgtaccgcagcgttcacattcaccaagatcccggctgaaacactgcacgggacagtcacagtggaggtacagtacgcagggacagatggaccttgcaaggttccagctcagatggcggtggacatgcaaactctgaccccagttgggaggttgataaccgctaaccccgtaatcactgaaagcactgagaactctaagatgatgctggaacttgatccaccatttggggactcttacattgtcataggagtcggggagaagaagatcacccaccactggcacaggagtggcagcaccattggaaaagcatttgaagccactgtgagaggtgccaagagaatggcagtcttgggagacacagcctgggactttggatcagttggaggcgctctcaactcattgggcaagggcatccatcaaatttttggagcagctttcaaatcattgtttggaggaatgtcctggttctcacaaatcctcattggaacgttgctgatgtggttgggtctgaacacaaagaatggatctatttcccttatgtgcttggccttagggggagtgttgatcttcttatccacagccgtctctgctgacttcggatgtggatttgacccagataggaaggtagcacagtgtggttctggctcattcgtgtggaagtcactggcccgttggccaatggctgatcacgctattgagtttgaagatagcaaagtgatggtgacttacttgactgacctattgatgagaaagaacaaagtctgcatagtgtgtgaagatgtattgcagtgtgccgcagcgcgtggagttgtcgagcagataacgtcgatcaatggaatcccaatccatcacaacatgtcgctgtcgcatggccgatatttcccacgtgtagtgaagaaagtacacaatgttaaggtgggaaaagccatgttgcgccttgcaatggccacatatgcgggagcgatgcctgagagtggattgggtgttttgaagacggggtatttttcacgcggagaagtgcaggaaacgtgggatgataaagttctaagagtcctaaccagcgccataaatgcagaggaagtgtgccagacggctgtcacgttccagtatgagttcgttcgatataaccggaaagtctttggatctaacatcgtgttgcgaccttcagcctttacgagcaaagcttgcccaacatatttagctggggctgtggtcaaaaacgacatagcaacgtttacggacggaatgatgtggatgcggagccggaaagtcaatgaaacgtgggaactgtttgagttggaaacaacccaaagccaccaatgcatttggccatacgcgtacacaatagacctagcaacacccacggacaagaggcttttcatgccgccacaatacggaggaccaatttcgtttgcgaaccacgtgcctggattccaggtgcaagaggactttccctggcagaaggcgaatatattaatgcgccagggaccggttccgggaacgaccgtagtccaggatccacactgtgatgaccggagcgcggcagtgccagttgaaccaactatgcaagcttggtgctgcaagacctgttttgatagaggagtgaagcctttccattttgtggttgacgggaaatttttctatccaatggaagtgcggccaatgaaactggaacaagacgctgtggtgattgagactgatgatggagagttcgagaggagtgagcatgagagcttgtttgaaggcaaagcaaagtggacatcaccgttaccaatgggagaaacagccaagattcaaaattttttcgtgaccagcccgccaaagccggaatcaagcctgcttttggtgggcgttctgattcatatgttaacaacgcgaacccgccatcggtgggcaactcgttgtgctggaacttggctcatctttttggtctttggacatccggttgtgtcttcggtgcagtcttgggcgtggctctttatgtcagctgccttagcaagtgtccctggtggttcttcactggtgatccacttctggattgggttgcagatatcgtcagcgcacctcttttacctgggttggttaatgaggaaacgcctgttgattacagagatgtcgcgagtggcacatctgattgcccagttgtgcagcttcgagacatatgcgtgggcaccgatcctcaaagtactggatcacttgctgtttccactctacactctgtcagtattcgtcgttcaccagcagtttcaggtattccacgacttgtggctacagagcgccgtggtgatggcacacctgttgcaacaccctctcagtggtttaataaccttgagtttaagcgtcggcttgattcagctaatagcaccaatgaaaagatggttttgctcaccagttatatggggagatggcttacgcgcgccgagaccacactggacagccttaacgtatttcatcgtgctgtatttggcagccgctgggatggagacagtgggtctgcacacgtccgggatgacagtgatgctgggcgggatgcttctgtgggttgtcctacagttgatgcccccgacagccttggaacttgtgcgcctaccgggacaaagtctgccagacggatgtgaagaagaagcgtcaacatctctaccagaaggaatgagtgggcattacgcccccgatggagttgaactcgtgaactacacagatgcagggactgtctccgcaaaccttgtggtatttgttgggtgtgctggaattatgactatgaacatatacgttgggttggttatcacggccttggcctgggtaacggacgccccgatgtggattccaagattgattgatggtgctatgtcccagcgggcaaattcggagctattgctgccatccccacctcttgagatacacaagacggaagactcgtttggttacatcccggacggaacatatcacgtgttggctagcagctggatgagcaagaaaccagttggtgttggagtggtgaaggagggcgtgtttcacacgttacaccacgtcaccaaaggagctaatgtgacatgggcaggacgtgaggttaggatgcactctggagatgttaggcgggatattgctgcctatggcgggccctggaacatcagcgggagtcttgaagatgtcgtagtagtgaaggccgtgaacaaggatggaaccgtgacatgctgccggattacaacagctaagttggacattgaaggaactacagtgatggctgttgagcgagattttggtttcggctcttcggggtcccccatatacgctcctgatggacggttgattggcttgtatggatacgggttttactatggaacgtacttctcaatagtttcaacaggagaaggagtggaggcaccaccggaagaggttgaagtctcaacacgtgagtttgtggactggcaccctggaagaggaaaaacgcgcacgatactcgttgagcaggccctgaagcatatagctgatggaaagaggttgctaattttgacaccaacgcgggtcgtaaaggatgaagtgcagcgagcgataaaggaagccgccccgcaggcggttatcggatcgaacttaagcatttttcggaagaacgccgttaccttggcatgccacgcgaccttcacgcagtatgtgatggagaaggggatagaaagtgtgaagttttcgaccatcattatggacgagtgccactttctggacccgatgtccatcgcgtgccgcgggataatggatttccacaacagccgtggaacgaaggtcatcttcatgagtgcgacgcccccaggacgagcaggaaacgctgggtccaactttacaatagaagacagagccatcaagttccccaaggagttgaccgcatcgtggatcaaagacaagtcaataggcaagaccatcgtttttgtgccaacaattacgcaagctgtgaggctggctaaagagttgggaggggtggccttgacccgagatacgttcaatgatgccatggggaaggcccggagtccggaaacaatgtttataatctcaacagacatcagcgagatgggagccaatctcggagtgactactgttatcgacacaagaactgttataaaaccattagtgtctgacaaaggagtttcacttgaaagggttggtgtgaccccagcttcaatcatccagcgcaggggccgagtaggtcggcgggagcccggagtatacatttatccccttgacgtcgaaccagaggagcagccggaaaattgggtgtgttgggtggaggcgcaaatgatcttagatcaattgggctgccatccgatgagagaggagagcgaatttttccgcccacaaggcacgtaccggattgacgacgtagagcagcggaggtttctggggttgatcaaggaaaaactgccaatttggcttgcttggacttgggccagctcacatgcgaacaaacatcagatgctatttcagggaaacgcccccaacactggacgaacattaaaaataaagacgccatccggatctcacatttacgccccaaaggtgacagatgataggtttgaaaaggagccagaaattgtgaaagtggcggccatcggattcttcctaaagcagagatcactatacttcgacttacctggattattgaccggattgtacacggtgttgacaacggctgggctcgatgcccttggaaattcgttcaaacgctctgtggacacccttcacgacatcggaaatgcggtggaaggagagttttctgctatacaaatgggacggattttacagatgtggtctgcgttgtttatcggggtgactttgggagttgtgctgatgggagccggatttgttgtggtgaaggcttttagaggattgtttggaacccgccaacaacacacaactgtgtgcgtgtcggagggcggaagtttccaaaaagttgccacggttctaatgagcgttggaccattgtgcgccgtttttggtggcattccctctatattcgtcttcattgtgaccgttgccctgttgattgtgctgtgtgtgggcggaggtggctctcaacgtggtgtgcttgattcggatctaatacgctgggtcatggtgttggccatgatgacaatcggagtgactgcgtgggagttggagctattaccaaacgtgagaagagatgttatacagttgactcgatacctgtttgctagcaatcctgccgttgttggagctgtgtttaacgccgggaatatcggattgggagtctctctgccagggaccctcatgatgagctacgccgcgagcggaacgctggccccccttattggagcgtgggccgaaggaaatttcttaggaaagctctttggtagcgaagtgcttccagctcaggctataggcggatttcaagtgacagctatcccgtggggatctatggtgccggttatcgctggttgctttctagcgacaaacactctttcgaaagtgtttggtgctggaattacaactgtgtttctcatactactctacttcgacaagaaacatgcattcacgaacaaggctgttaaggttttgttggcgcggacaaacagaagggacatggaggaagaaatcacaacaagggacgcggagtcgcgggctcgccaactgttttatggcctacaactggccgtatcgttgctgtgggttctctcacatcctgtgttggaaaacttcgttccattctttgctgtgtgcgggtacacattcctgtcgctcttgaggccaaatcatcaactacatgctgcgttggattatacattggtagtcctgctcttgcaggtagttgaacctgggaacatcatgtacgtcggcggatgcgttttgttatggtatgttttaaaccctaccagattgggcgtgcgctcgctggtgaagagtgacaccggaggtttaggcttccgttggaagaaagcgttgaattcacttagtgagaggcagtttgccatctacaaagtcagaggcgtgaatgaaactgataaaggagcctacgtgtcgcgaggtggtttaaaaatgaacgagattatcaacaagcatgcgtgggaacctcgaggagttgtcgttgacctgggatgtggacgaggaggttggtcccagcgcttggtgatggattaccgcgtcgctgaagtaagaggatacacacttggaggcaaagaacgtgagaatccccaaccgttccaaacgaaaggatataacttggcgaatttgaaggctggagttgacgtctataaaatggagccagtgaattgtaacaccataatttgcgacataggtgagagtgacccgcgtcctgaagttgaaaaaactcgaacgctgaaggttttgggaatgctggagaaatggctggaagtcaatccaaacgcctctttttgctgcaaagtgctatcaccttatcacttggacgtgcttcgaaagttagagtcgctgcaacacaagtataacgggcggctggttcgactgtcttacagtcggaactcaacagcagaaatgtattatgtgtcaggaaagagggcaaacgtggtggcaagcgtgtacttcatgcttgggtcgctggtaggtaggctgcggagacatgagccatcaatcatcgaccccccaccggttctagagatgggaaccagaagcgatccgcgagcaaaggccaaagcgcaagacttcgagatgatccgaagaagagtggaacgactacgaggagaaaatcggaaaacatggtttgtggacaacgaacatccatatgtgtcatttaactaccatggatccttcgtgactgatgaggtgacagcgggcggacaaacaacaaatcccttgattagacgcgttatgtggccatgggactttctgtctcgggtgacaacctttatgatgaccgatgtttcaacgtatgcccaacaaaaggtgctgcgtgaaaaagtggacactgtctctgaggagcccgacgagcgaatgaaagcaattaacagactcatcatgacacacttcgtgaaaatgttcaagcggcgcgggctgaaaccgagggtgttgacaccacaagactacatgaataatgtccaagccaacgcagccataggaggatggagcgaagtaatggattggcaaaacgtgcgcgatgctttggcagatcaacgattctgggacatggtagataacgagagggccttacacttgcgtggtgactgtgagctttgcatctataacacgatgggaaagaaagaaaagaagccatctgcctttggcactgcgaaaggttcacgcaccatctggtatatgtggctgggtagccgttatttagagtacgaggctttaggattcttgaacgaagatcattgggttgcacgagaaaactttccatgtggagtcggtggcgtcggcgttaactattttggatattacctgaaggaaatagccgggggaggccggtggcttatcgcagacgatgtcgcgggatgggacacgagaataacccaaggagatctagatgatgagctgttcatgttaaccgagcttgccccaaccacataccacaagaaattgataactgcgacaatgacgttggcttataaaaacatagtggccttattccctagaaatcatccgatgtaccgaagtggaactgttcttgatgtgttgtctcgaacggatcagcgtgggtcgggccaggtgacaacatacgctttgaacactgtgactaatggaaagtgccaggtcgggagaacattagaagcgtgtggcttgctggacgccccgctcaccacaatcgactcctggctcactgccaacttggaacgagttcttggagcaatggtcgttgccggagatgatgtggtagtggcgacagacaatgaagaattccacacgagtttgagatacataacagcgacgtcaaagatccgaaagaacttaggggtgagtgagccatcgccgagattcacgagctgggaagatgttgagttttgctcacaccacttccatccactgacgttacgtgatggccgtgtgctgatcgccccgtgtcgtgaccaaaacgaaattatcggaagatcaagaatccagaaaggcggaatagttgacatggcctcggctgggtgcttagcgaaggctcacgcgcagatgtgggccctttacttcttccatcggcgagacttacggattggattcgcggccatcacatcaattgtgcctatcaactgggtgccgacgggcaggatatcatggtctatccaccagaacgcagagtggatgacgactgaggatatgctaacggtttggaacaacgtgtggattagggacaatccgtggatgagaggaaaagaacgagtgacttcatggacagacataccgtatttacccaaaggagtggacataaagtgcggaagcctaataggcgattccgaccgcgcttcctggtcaaagacgattcccctagttgtggagaagacccgaaaaatccttgagcaggagaggggaacattgaagttctacaatgggttatccattctaggacggtatgttcaccacgtcgatcctgtgttcaactgaagtgtgacgatgtaggcccgcgggagccttagaattcaagagcttgggaattctagaatcccgtttaccgcaggagggggtcatatggagcaggtggctatgtatagcctggctaaatgtatggctcctgggggagtgacgcccctccggttccagttcctgggtgaacaggtaaaaaccaccacgaagcgccgcttcaacatcgcaagggggagaaatcccgggtgctgacgccaccccgaccccagtcccacataaggctgtgacgaaagagccttaccggcacgaggagtgcccaccgcaaggaggagaaatcctgggcgttgacgacgccccggccccagtctctgataggtgaccagaaccatgtcaccccaaagtgttgaaaggacactgatcaccagaaatggtgagggcacacagggcttagcccaaggtgagtgacgacacctcccgaaatgtgtaaatagcagggtcagctctaagcagcaggcttccaccgttaggaagcgttgctgtgagcttacttggctacgtct

SEQ ID NO: 13 - DNA, 23810 bp, Artificial Sequence
  synthetic
  misc_feature (11960)..(11960): n is a, c, g, or t
  misc_feature (11965)..(11965): n is a, c, g, or t
  misc_feature (11968)..(11968): n is a, c, g, or t
gggtcggcatggcatctccacctcctcgcggtccgacctgggcatccgaaggaggacgtcgtccactcggatggctaagggagagccacttttctctcgattctctatcggaatctagggagctcggatccagacatgataagatacattgatgagtttggacaaaccacaactagaatgcagtgaaaaaaatgctttatttgtgaaatttgtgatgctattgctttatttgtaaccattataagctgcaataaacaagttaacaacaacaattgctcgagggggggcccggtaccttgaagctgtccctgatggtcgtcatctacctgcctggacagcatggcctgcaacgcgggcatcccgatgccgccggaagcgagaagaatcataatggggaaggccatccagcctcgcgtcggcgcttaaggatcatgatgataaacaatgtatggtgctaatgttgcttcaacaacaattctgttgaactgtgttttcatgtttgccaacaagcacctttatactcggtggcctccccaccaccaacttttttgcactgcaaaaaaacacgcttttgcacgcgggcccatacatagtacaaactctacgtttcgtagactattttacataaatagtctacaccgttgtatacgctccaaatacactaccacacattgaacctttttgcagtgcaaaaaagtacgtgtcggcagtcacgtaggccggccttatcgggtcgcgtcctgtcacgtacgaatcacattatcggaccggacgagtgttgtcttatcgtgacaggacgccagcttcctgtgttgctaaccgcagccggacgcaactccttatcggaacaggacgcgcctccatatcagccgcgcgttatctcatgcgcgtgaccggacacgaggcgcccgtcccgcttatcgcgcctataaatacagcccgcaacgatctggtaaacagttttaaaaaacttttgcgttagtaaaaccacggagttttggtttgctgagaatagtgcgagggttgttttaattatttcggagattttggttcgtgatgaatcaggagagaggaatactcaggggtatggggaggttcccccccccccctgtgaagaaggggaacaagaattctgttgccgtggccagggtgccaccgcagcaaggaggaaaagcgagagagaaaaaccgtgagaggattaaagcgccaggagcgcgacatggagttgccggaaagatgaaaagtctaatgggagaattgggctttggatggattgatttactacgcgttgatttggtggaaggaattatgatgatggtttttgttatacagcgggctttcgcccaagtgcaccggagaattagaggattatcaagacgcgtcagggcattggagaagaagcgtgacggtcgagcggctatgttcatttggactatattggcaatgttattcggagttatgggatttcatctgaccacacgcaacggagaaccacacatgatcgtcagtagacaagaaaaagggaaaagccttctgtttaagacaaaggacggcacgaacatgtgtaccctcatggccatggaccttggtgagttgtgtgaagacacaatcacgtataaatgtccttttctcaagcagaacgaaccagaagacatagattgttggtgcaactccacgtccacatgggtaacttatgggacatgtaccaccacaggagagcacagaagagaaaaaagatcagtggcgcttgttccacacgtgggaatgggattggagacacgaactgaaacatggatgtcatcagaaggggcctggaaacatgcccagagaattgaaacttggattctgagacatccaggctttaccataatggccgcaatcctggcatacaccataggaacgacgcatttccaaagagtcctgatattcatcctactgacagccatcgctccttcaatgacaatgcgctgcataggaatatcaaatagggactttgtggaaggagtgtcaggagggagttgggttgacatagttttagaacatggaagttgtgtgacgacgatggcaaaaaataaaccaacactggactttgaactgataaaaacagaagccaaacaacccgccaccttaaggaagtactgtatagaggctaaactgaccaacacgacaacagactcgcgctgcccaacacaaggggaacccaccctgaatgaagagcaggacaaaaggtttgtctgcaaacattccatggtagacagaggatggggaaatggatgtggattatttggaaaaggaggcatcgtgacctgtgctatgttcacatgcaaaaagaacatggaaggaaaaattgtgcagccagaaaacctggaatacactgtcgtgataacacctcattcaggggaagaacatgcagtcggaaatgacacaggaaaacatggtaaagaagtcaagataacaccacagagctccatcacagaggcggaactgacaggctatggcactgttacgatggagtgctctccaagaacgggcctcgacttcaatgagatggtgttgctgcaaatgaaagacaaagcttggctggtgcacagacaatggttcctagacctaccgttgccatggctgcccggagcagacacacaaggatcaaattggatacagaaagagacactggtcaccttcaaaaatccccatgcgaaaaaacaggatgttgttgtcttaggatcccaagagggggccatgcatacagcactcacaggggctacggaaatccagatgtcatcaggaaacctgctgttcacaggacatctcaagtgcaggctgagaatggacaaattacaacttaaagggatgtcatactccatgtgcacaggaaagtttaaaattgtgaaggaaatagcagaaacacaacatggaacaatagtcattagagtacaatatgaaggagacggctctccatgcaagatcccctttgagataatggatctggaaaaaagacatgttttgggccgcctgatcacagtcaacccaattgtaacagaaaaggacagtccagtcaacatagaagcagaacctccattcggagacagctacatcatcataggagtggaaccaggacaattgaagctggactggttcaagaaaggaagttccatcggccaaatgtttgagacaacaatgaggggagcgaaaagaatggccattttgggcgacacagcctgggattttggatctctgggaggagtgttcacatcaataggaaaggctctccaccaggtttttggagcaatctacggggctgctttcagtggggtctcatggactatgaagatcctcataggagttatcatcacatggataggaatgaactcacgtagcacatcactgtctgtgtcactggtattagtgggaatcgtgacactgtacttgggagttatggtgcaggccgacttcggatgtggatttgacccagataggaaggtagcacagtgtggttctggctcattcgtgtggaagtcactggcccgttggccaatggctgatcacgctattgagtttgaagatagcaaagtgatggtgacttacttgactgacctattgatgagaaagaacaaagtctgcatagtgtgtgaagatgtattgcagtgtgccgcagcgcgtggagttgtcgagcagataacgtcgatcaatggaatcccaatccatcacaacatgtcgctgtcgcatggccgatatttcccacgtgtagtgaagaaagtacacaatgttaaggtgggaaaagccatgttgcgccttgcaatggccacatatgcgggagcgatgcctgagagtggattgggtgttttgaagacggggtatttttcacgcggagaagtgcaggaaacgtgggatgataaagttctaagagtcctaaccagcgccataaatgcagaggaagtgtgccagacggctgtcacgttccagtatgagttcgttcgatataaccggaaagtctttggatctaacatcgtgttgcgaccttcagcctttacgagcaaagcttgcccaacatatttagctggggctgtggtcaaaaacgacatagcaacgtttacggacggaatgatgtggatgcggagccggaaagtcaatgaaacgtgggaactgtttgagttggaaacaacccaaagccaccaatgcatttggccatacgcgtacacaatagacctagcaacacccacggacaagaggcttttcatgccgccacaatacggaggaccaatttcgtttgcgaaccacgtgcctggattccaggtgcaagaggactttccctggcagaaggcgaatatattaatgcgccagggaccggttccgggaacgaccgtagtccaggatccacactgtgatgaccggagcgcggcagtgccagttgaaccaactatgcaagcttggtgctgcaagacctgttttgatagaggagtgaagcctttccattttgtggttgacgggaaatttttctatccaatggaagtgcggccaatgaaactggaacaagacgctgtggtgattgagactgatgatggagagttcgagaggagtgagcatgagagcttgtttgaaggcaaagcaaagtggacatcaccgttaccaatgggagaaacagccaagattcaaaattttttcgtgaccagcccgccaaagccggaatcaagcctgcttttggtgggcgttctgattcatatgttaacaacgcgaacccgccatcggtgggcaactcgttgtgctggaacttggctcatctttttggtctttggacatccggttgtgtcttcggtgcagtcttgggcgtggctctttatgtcagctgccttagcaagtgtccctggtggttcttcactggtgatccacttctggattgggttgcagatatcgtcagcgcacctcttttacctgggttggttaatgaggaaacgcctgttgattacagagatgtcgcgagtggcacatctgattgcccagttgtgcagcttcgagacatatgcgtgggcaccgatcctcaaagtactggatcacttgctgtttccactctacactctgtcagtattcgtcgttcaccagcagtttcaggtattccacgacttgtggctacagagcgccgtggtgatggcacacctgttgcaacaccctctcagtggtttaataaccttgagtttaagcgtcggcttgattcagctaatagcaccaatgaaaagatggttttgctcaccagttatatggggagatggcttacgcgcgccgagaccacactggacagccttaacgtatttcatcgtgctgtatttggcagccgctgggatggagacagtgggtctgcacacgtccgggatgacagtgatgctgggcgggatgcttctgtgggttgtcctacagttgatgcccccgacagccttggaacttgtgcgcctaccgggacaaagtctgccagacggatgtgaagaagaagcgtcaacatctctaccagaaggaatgagtgggcattacgcccccgatggagttgaactcgtgaactacacagatgcagggactgtctccgcaaaccttgtggtatttgttgggtgtgctggaattatgactatgaacatatacgttgggttggttatcacggccttggcctgggtaacggacgccccgatgtggattccaagattgattgatggtgctatgtcccagcgggcaaattcggagctattgctgccatccccacctcttgagatacacaagacggaagactcgtttggttacatcccggacggaacatatcacgtgttggctagcagctggatgagcaagaaaccagttggtgttggagtggtgaaggagggcgtgtttcacacgttacaccacgtcaccaaaggagctaatgtgacatgggcaggacgtgaggttaggatgcactctggagatgttaggcgggatattgctgcctatggcgggccctggaacatcagcgggagtcttgaagatgtcgtagtagtgaaggccgtgaacaaggatggaaccgtgacatgctgccggattacaacagctaagttggacattgaaggaactacagtgatggctgttgagcgagattttggtttcggctcttcggggtcccccatatacgctcctgatggacggttgattggcttgtatggatacgggttttactatggaacgtacttctcaatagtttcaacaggagaaggagtggaggcaccaccggaagaggttgaagtctcaacacgtgagtttgtggactggcaccctggaagaggaaaaacgcgcacgatactcgttgagcaggccctgaagcatatagctgatggaaagaggttgctaattttgacaccaacgcgggtcgtaaaggatgaagtgcagcgagcgataaaggaagccgccccgcaggcggttatcggatcgaacttaagcatttttcggaagaacgccgttaccttggcatgccacgcgaccttcacgcagtatgtgatggagaaggggatagaaagtgtgaagttttcgaccatcattatggacgagtgccactttctggacccgatgtccatcgcgtgccgcgggataatggatttccacaacagccgtggaacgaaggtcatcttcatgagtgcgacgcccccaggacgagcaggaaacgctgggtccaactttacaatagaagacagagccatcaagttccccaaggagttgaccgcatcgtggatcaaagacaagtcaataggcaagaccatcgtttttgtgccaacaattacgcaagctgtgaggctggctaaagagttgggaggggtggccttgacccgagatacgttcaatgatgccatggggaaggcccggagtccggaaacaatgtttataatctcaacagacatcagcgagatgggagccaatctcggagtgactactgttatcgacacaagaactgttataaaaccattagtgtctgacaaaggagtttcacttgaaagggttggtgtgaccccagcttcaatcatccagcgcaggggccgagtaggtcggcgggagcccggagtatacatttatccccttgacgtcgaaccagaggagcagccggaaaattgggtgtgttgggtggaggcgcaaatgatcttagatcaattgggctgccatccgatgagagaggagagcgaatttttccgcccacaaggcacgtaccggattgacgacgtagagcagcggaggtttctggggttgatcaaggaaaaactgccaatttggcttgcttggacttgggccagctcacatgcgaacaaacatcagatgctatttcagggaaacgcccccaacactggacgaacattaaaaataaagacgccatccggatctcacatttacgccccaaaggtgacagatgataggtttgaaaaggagccagaaattgtgaaagtggcggccatcggattcttcctaaagcagagatcactatacttcgacttacctggattattgaccggattgtacacggtgttgacaacggctgggctcgatgcccttggaaattcgttcaaacgctctgtggacacccttcacgacatcggaaatgcggtggaaggagagttttctgctatacaaatgggacggattttacagatgtggtctgcgttgtttatcggggtgactttgggagttgtgctgatgggagccggatttgttgtggtgaaggcttttagaggattgtttggaacccgccaacaacacacaactgtgtgcgtgtcggagggcggaagtttccaaaaagttgccacggttctaatgagcgttggaccattgtgcgccgtttttggtggcattccctctatattcgtcttcattgtgaccgttgccctgttgattgtgctgtgtgtgggcggaggtggctctcaacgtggtgtgcttgattcggatctaatacgctgggtcatggtgttggccatgatgacaatcggagtgactgcgtgggagttggagctattaccaaacgtgagaagagatgttatacagttgactcgatacctgtttgctagcaatcctgccgttgttggagctgtgtttaacgccgggaatatcggattgggagtctctctgccagggaccctcatgatgagctacgccgcgagcggaacgctggccccccttattggagcgtgggccgaaggaaatttcttaggaaagctctttggtagcgaagtgcttccagctcaggctataggcggatttcaagtgacagctatcccgtggggatctatggtgccggttatcgctggttgctttctagcgacaaacactctttcgaaagtgtttggtgctggaattacaactgtgtttctcatactactctacttcgacaagaaacatgcattcacgaacaaggctgttaaggttttgttggcgcggacaaacagaagggacatggaggaagaaatcacaacaagggacgcggagtcgcgggctcgccaactgttttatggcctacaactggccgtatcgttgctgtgggttctctcacatcctgtgttggaaaacttcgttccattctttgctgtgtgcgggtacacattcctgtcgctcttgaggccaaatcatcaactacatgctgcgttggattatacattggtagtcctgctcttgcaggtagttgaacctgggaacatcatgtacgtcggcggatgcgttttgttatggtatgttttaaaccctaccagattgggcgtgcgctcgctggtgaagagtgacaccggaggtttaggcttccgttggaagaaagcgttgaattcacttagtgagaggcagtttgccatctacaaagtcagaggcgtgaatgaaactgataaaggagcctacgtgtcgcgaggtggtttaaaaatgaacgagattatcaacaagcatgcgtgggaacctcgaggagttgtcgttgacctgggatgtggacgaggaggttggtcccagcgcttggtgatggattaccgcgtcgctgaagtaagaggatacacacttggaggcaaagaacgtgagaatccccaaccgttccaaacgaaaggatataacttggcgaatttgaaggctggagttgacgtctataaaatggagccagtgaattgtaacaccataatttgcgacataggtgagagtgacccgcgtcctgaagttgaaaaaactcgaacgctgaaggttttgggaatgctggagaaatggctggaagtcaatccaaacgcctctttttgctgcaaagtgctatcaccttatcacttggacgtgcttcgaaagttagagtcgctgcaacacaagtataacgggcggctggttcgactgtcttacagtcggaactcaacagcagaaatgtattatgtgtcaggaaagagggcaaacgtggtggcaagcgtgtacttcatgcttgggtcgctggtaggtaggctgcggagacatgagccatcaatcatcgaccccccaccggttctagagatgggaaccagaagcgatccgcgagcaaaggccaaagcgcaagacttcgagatgatccgaagaagagtggaacgactacgaggagaaaatcggaaaacatggtttgtggacaacgaacatccatatgtgtcatttaactaccatggatccttcgtgactgatgaggtgacagcgggcggacaaacaacaaatcccttgattagacgcgttatgtggccatgggactttctgtctcgggtgacaacctttatgatgaccgatgtttcaacgtatgcccaacaaaaggtgctgcgtgaaaaagtggacactgtctctgaggagcccgacgagcgaatgaaagcaattaacagactcatcatgacacacttcgtgaaaatgttcaagcggcgcgggctgaaaccgagggtgttgacaccacaagactacatgaataatgtccaagccaacgcagccataggaggatggagcgaagtaatggattggcaaaacgtgcgcgatgctttggcagatcaacgattctgggacatggtagataacgagagggccttacacttgcgtggtgactgtgagctttgcatctataacacgatgggaaagaaagaaaagaagccatctgcctttggcactgcgaaaggttcacgcaccatctggtatatgtggctgggtagccgttatttagagtacgaggctttaggattcttgaacgaagatcattgggttgcacgagaaaactttccatgtggagtcggtggcgtcggcgttaactattttggatattacctgaaggaaatagccgggggaggccggtggcttatcgcagacgatgtcgcgggatgggacacgagaataacccaaggagatctagatgatgagctgttcatgttaaccgagcttgccccaaccacataccacaagaaattgataactgcgacaatgacgttggcttataaaaacatagtggccttattccctagaaatcatccgatgtaccgaagtggaactgttcttgatgtgttgtctcgaacggatcagcgtgggtcgggccaggtgacaacatacgctttgaacactgtgactaatggaaagtgccaggtcgggagaacattagaagcgtgtggcttgctggacgccccgctcaccacaatcgactcctggctcactgccaacttggaacgagttcttggagcaatggtcgttgccggagatgatgtggtagtggcgacagacaatgaagaattccacacgagtttgagatacataacagcgacgtcaaagatccgaaagaacttaggggtgagtgagccatcgccgagattcacgagctgggaagatgttgagttttgctcacaccacttccatccactgacgttacgtgatggccgtgtgctgatcgccccgtgtcgtgaccaaaacgaaattatcggaagatcaagaatccagaaaggcggaatagttgacatggcctcggctgggtgcttagcgaaggctcacgcgcagatgtgggccctttacttcttccatcggcgagacttacggattggattcgcggccatcacatcaattgtgcctatcaactgggtgccgacgggcaggatatcatggtctatccaccagaacgcagagtggatgacgactgaggatatgctaacggtttggaacaacgtgtggattagggacaatccgtggatgagaggaaaagaacgagtgacttcatggacagacataccgtatttacccaaaggagtggacataaagtgcggaagcctaataggcgattccgaccgcgcttcctggtcaaagacgattcccctagttgtggagaagacccgaaaaatccttgagcaggagaggggaacattgaagttctacaatgggttatccattctaggacggtatgttcaccacgtcgatcctgtgttcaactgaagtgtgacgatgtaggcccgcgggagccttagaattcaagagcttgggaattctagaatcccgtttaccgcaggagggggtcatatggagcaggtggctatgtatagcctggctaaatgtatggctcctgggggagtgacgcccctccggttccagttcctgggtgaacaggtaaaaaccaccacgaagcgccgcttcaacatcgcaagggggagaaatcccgggtgctgacgccaccccgaccccagtcccacataaggctgtgacgaaagagccttaccggcacgaggagtgcccaccgcaaggaggagaaatcctgggcgttgacgacgccccggccccagtctctgataggtgaccagaaccatgtcaccccaaagtgttgaaaggacactgatcaccagaaatggtgagggcacacagggcttagcccaaggtgagtgacgacacctcccgaaatgtgtaaatagcagggtcagctctaagcagcaggcttccaccgttaggaagcgttgctgtgagcttacttggctacgtctsdnbgvwnvknrmchmrcsvctrgggtcggcatggcatctccacctcctcgcggtccgacctgggcatccgaaggaggacgtcgtccactcggatggctaagggagagccacttttctctcgattctctatcggaatctagggagctcggatccagacatgataagatacattgatgagtttggacaaaccacaactagaatgcagtgaaaaaaatgctttatttgtgaaatttgtgatgctattgctttatttgtaaccattataagctgcaataaacaagttaacaacaacaattgctcgagggggggcccggtaccttgaagctgtccctgatggtcgtcatctacctgcctggacagcatggcctgcaacgcgggcatcccgatgccgccggaagcgagaagaatcataatggggaaggccatccagcctcgcgtcggcgcttaaggatcatgatgataaacaatgtatggtgctaatgttgcttcaacaacaattctgttgaactgtgttttcatgtttgccaacaagcacctttatactcggtggcctccccaccaccaacttttttgcactgcaaaaaaacacgcttttgcacgcgggcccatacatagtacaaactctacgtttcgtagactattttacataaatagtctacaccgttgtatacgctccaaatacactaccacacattgaacctttttgcagtgcaaaaaagtacgtgtcggcagtcacgtaggccggccttatcgggtcgcgtcctgtcacgtacgaatcacattatcggaccggacgagtgttgtcttatcgtgacaggacgccagcttcctgtgttgctaaccgcagccggacgcaactccttatcggaacaggacgcgcctccatatcagccgcgcgttatctcatgcgcgtgaccggacacgaggcgcccgtcccgcttatcgcgcctataaatacagcccgcaacgatctggtaaaccgtaaaatccgtacgcttgttttggcacactagtttgtgacataaggcttttgtcgcgcgtattgggtttaactttttttcgagaaatcgagaggtaagaagaattgaaagacattatgtctaacccttccgtcaggaggggtgtcaatgtgatggcggctcagaaaaaacgagtcgcccaaaaaataaaatcaatgaggaagggaacccagagcatcagcaatggagttaggggtttcatcctctttttcatatcccaaatcttctgggcacgtaagatcacgcccagagtgaaaggattgtggaaaaaactagacaaatttcaggcaatgaaggttttgaaagggctaaggaacatcatcaatggattgatgagatcggtcgctgggaaaaagaaacgccgtggagggaataccgtgccattcttagtgatgatgatggtagcaacaacatgggccgtcactctctccaactttcaagggaaggtgatgatgacggtgaacgctactgacgtcacagacattatcacgataccaacggccgctggaaagaacctgtgcattgtcagagctatggatgtggggcacatgtgtgatgatactatcacctatgaatgtccagtgttgtcggccggaaatgatccagaagacattgactgctggtgcacgaagttagcagtctacgttaggtatggaagatgcaccaagacacgacactcaagacgcagcagaaggtcactaacagtgcagacgcatggagagagcaccctatcgaacaaaaagggggcctggatggacagcaccaaggctacaaggtacttggtaaaaacagaatcatggatcttgagaaaccctggatatgccttggtggcagctgtcattggatggatgctcggaagcaacaccatgcagcgtgtcgtgtttgccgtgttactgcttttggtagctccagcttacagctttaactgtcttggaatgagcaacagagatttcctggagggagtgtccggagcaacatgggtggacttggtccttgaaggtgacagctgtgtgaccattatgtccaaggacaagcccaccatcgatgtgaagatgatgaacatggaggccgctaacttagcagaagtccgcagttattgctacttagccactgtcagtgaactctccaccaaggctgcgtgcccaaccatgggggaagcccataatgacaagcgggctgacccatcttttgtgtgcaaacaaggagtagtggatagaggttggggcaatgggtgcggactttttggtaaaggaagcatcgacacatgcgccaaatttgcctgttcaaccaaggcaacgggaaggactatcttaaaggagaacattaagtatgaggtggctatctttgtgcatggaccaactaccgtggaatcgcatgggaactacttcacgcaaaccggagctgctcaggctgggagatttagtatcacccccgcggcaccctcttacactcttaagctcggagagtatggagaagtaacagtggactgtgaaccacgctcagggatagacaccagtgcatactatgtgatgactgtcgggacaaagactttcttggtccaccgtgagtggtttatggacctcaacctcccctggagcagtgctgaaagtaatgtttggaggaacagagagacgctaatggagtttgaagaaccacacgctacgaagcaatctgtgatagcattgggctctcaagagggagccctgcatcaagctctggcaggagccattcctgtggaattttcaagcaacactgtcaagctgacgtcaggccacctgaagtgtagggtgaagatggaaaaattgcagctgaaggggacaacttatggcgtctgttcaaaggccttcagattccttgggactcccgcagacacgggccatggtactgtggtactggaactgcagtacacaggcacggatggaccctgcaagatacccatttcatcagtagcttcattgaatgacctaacgccagtgggcaggttagttaccgtcaacccctttgtctccgtgtcaacggccaatgctaaagtcctgattgagttggaaccaccctttggagattcgtacatagtggtgggaagaggagagcaacagatcaaccatcactggcacaagtctggaagtagcattggcaaagctttcacagccaccctcaagggagctcagagactagcagctctgggagacacagcttgggactttggatcggttggaggagtgtttacctccgtgggaaaggctgtccatcaagtatttggtggagcattccgctcattgtttggaggcatgtcttggataactcagggtctgctgggggccctcctattgtggatgggtattaacgctcgtgatagatccatagccctcacgttcctcgcggttggaggagttctgctctttctctccgtgaacgtgcatgctgagtacggttgctcattggacttccaaaggaaagaactgaagtgcggcgatggagttttcgtgttcaatgatgccaatgattggttgaccaagtacagatatcatcctgaagacccacgaacattggcttctctggtcaaggcttcatataaggccggacggtgtgggcttggatcagttgacaacatggaacataagatgtgggtgtccctggaaaatgagttgaatgccatctttgaggaaaaccaagaaaatatctcagtggtagtgaaggagagtaatggaatataccccaaaggaaattatccattcactggcactccagaaaagctgaaatatggatggaaaacatgggggaagaaattggtatttgccccggttttgagtaacaacacctttgtaatagatggaactcccgatgattgtccttacagcaacagagtttggaattcatttgagattgatgagttcggagcaggtttgactcataccagggtgtttttgaaacaaagactggaaagaaaagaagagtgtgacaatgcacttttaggagctgcagccaaaggggacgtggcagtccatggggatcccaacttctggatggcctcaaacaaaactggagaagtgtggcagatcaatgaattaatgtcactaaacctcaagcactgcacatggcccttgtctcatacgttgcatggcaatggagttctggaatcagacatgttcgttccgaaaagcattggaggaccggttagtcaccacaacttcattaaaggctacaaatctcaggtaaatggaccttgggcatcagtgcctctagaaatgcatcggagagagtgccctgacacagtggttcaaatagatcagaactgcagcgggagaggcaagtccacacggagcactacaaaggaagggaaaataatccgggattggtgttgtcgaaactgcacgctgccccctgttagctttgatggtcctgatggatgctggtatgctatggagattagaccgcagaagatgaatgaaaaacatttggtcacttcatgggtaagtgccggtgacgggatggaaaatggtaacattggattggtggctctctttgtgtgctttgacatgttcttgaagaacaagaacacccgaaagattagcttggttggagccttgtgtctattgggcgcaatgatccttgggaatgttggatttgttgatctaataaaattcatgattgtggttggtgaacatttccgctccttcaaccatggaggtgacgtctcctacttggtcctgaccgctgtctttgacatcaggccagccctgctctgcggctttgtgctgcgcaagaaatggagtcctagtgagagagtagtcatggccattggaatgatgctcctgcaaacggtgtgtggggattggactcagacatcttggtgggaatggctggatgctgttggattggggctcttgatcctcaatgcagtagctttacaaagatggaaaccggccattttggtcttgctgacaatgttgactccgctgaatatgcgagtaattcaaggtgctgcagggggagtgtgtggcgttatggtggccatgtctttgtggaaaacagaaggaagaagtctccgtaagagttacctgccagtcattggctatgttgcttcggcttttggatgggggtattcatggatcatggcagtgtacatcatgtgggcaacccatgtgtcaaggagatcttggcctgtaggagagctggcagcagcaattggacttttgggagctgcaatgggaatggcatccacaaaggatggagccatggtcatgccaatagctgtgctcggattaatcatggtgatcataggaatgacaggcaaatgcgatggaatggagattcgcaaagttgggtgtgtctcgtgggaagactccgctgagatcagtggttcaagctccaggtatgacgtggctcttagtgatggcggagaattccagctgttagagaattcgcggcccccctggaatcacatcattttcctcaccctgggaatgctggcgtcagcagtgcatccaatagtactgggtgtggtcatacttgcctgggggtggtttgcaggcaaaagccagcgcagtggagttttgtgggacgtgcctgttgctccaaaagttgaggaccatggaccccttgaggatggaatttacaccattttccagaatggattgtttgggagctcccaggctggagtaggagtggctcagggaggcgtgtttcacactatgtggcacgttactcgtggaggaatcctgctgcacaaaggtaaaagactcacccctggttgggctagtgtgaaaagtgacctcatttcgtatggaggtaaatggagacttgatggaagttgggatggagtcgaggaagttcagttgattgctgtccctcccaggaaaaatcctatcaatgttcaaactaagcccagcattttcaaattaaagagtggagaggagatgggagccatagctttggattaccctagtggaacttcaggatcacccattgtcaacagagctggagtcgttgtggggttgtatggaaatggaattgtgctcaatcagggtggttatgtgtcagctattagccaagcagctgtggaagaggtcagtagagatgagctacccggaattgaaggctacctgagaaaggggcaactcaccgttctggattttcacccaggggcaggaaagacacgtaacttcctgccccaaatcttgaaggcatgcaggacccgcaagttgcgaacactagtgctggccccaaccagagtggttctgagcgaaatgaaggaagctctgaatgatcacgatgtcaagtaccacacacaagctttctcatctgccagttcaggacgtgaactgattgacgctatgtgccatgcaacattggcatatagactattggaaagcactagggtgataaactgggaggttgtgataatggatgaggctcactacatggatccagccagcattgctgtgaggggttgggctgcccatagagctagagctcatgaatgtgcaacaatattcatgtcagcgactcccccagggactgcaaatgaatttcctgaatcaaatggaggcattgaggacatccgcaaggacatccccagtgaggcttggaacaaaggtcatgagtggatcctagaggatagaaggccaacggtgtggttcctgccctctataaggagcgcaaataacattgctgcatgtttgaggaaagccaacagaacggttgttgtgttaaacagacagacctttgaaagtgtgtaccccactatcaagacaaagaaaccggacttcatcctagccacagacattgctgagatgggggcaaatcttcatgtggaaagggtaattgactgccgaactgctttcaagccagtgctcagtgaggatcaggaacgggtaacactgaaagggccaatgagaatatcagcttctgcggcagctcagcgaagaggccgtgtggggagagatccatccagagagtctgacacatattactatggagaggacacctcagaggacaatgaccatttggtgtgctggactgaggcgtctatgattctggataacatggaaattaaagggggaatggtggctccgctgtacagcgtggaagccacaaagaccaaaatgacgccaggtgagtgtaggctaagagatgatcaaaggaaaacttttagagcattaataaagaaacatgagctgcctgtgtgggtctcatggaaggtggccaaagcaggaatcactccagatgataggaagtggtgttttgatggagaggaggacaacaccgtgcttaatgacatgggggagaaggtcatgggaagaagcccaggaggtgcaaagaaagctttgtgccctaggtggtcagacgcaaggctgactagtgacaatgcttccctcatgaacttcctggcatttgccgaggggaggagatcatacatgaggatcgttgacgctctcatcatggtgccccctatgctgaaagaaaaggtggtggatgcagcggacaccttagcactactactgcgttccgaggagggcagcagggcctacaaacttgctcaggagagcgctccagaagcgatcacaacactcatcatggtaaccttcctggttctgctatcagcaggactggttctgatgctcatgtggccaaaagggattagcaagatgtcattgggcatgctcaccatgagcgttgcgggataccttcttttggaaggagggctcacccaagtgcaggttgcaggaatattgctggtgtttttcatcttgatggtggttctaatccctgatgatggctcccagaggtcaatcaacgacaacaagctggcttacatgatgacaggaattatccttcttgttggagctgttgctgctaatgagatgggatggcttgaaaaaacgaaacaggatttgtttgggaaaagggaagaaatgccgggatggaactgggatttgggacttgacctaagacctggagcagcctggaccacttatgtggctctggcgactgtccttggcccagtgatagaccattggatacaagtggaatatggaagcgctagtttgactggcatagccaattcagcaggcatttccgcatttctggacaagggggttcctttcatgaaggtcaacatggcagtggtggttctgtttgtgagcgcatggaatagctattccatgctggccatcatggagggttgcctgatggcaggcattcatttttgcctgttaatccctgggctgaaggcaagagcaatgaagaaggcccaaaagaggatctatcatggtctatctaagaatccagtagttgatggcacacccactgtggatattgaagaagctgaagaaactccagtactgtatgagaagaaagtggctttggcactgctgggagttgtggctgcgctcaatggaattgtggtcagaacacctttctccatggctgaatcaattgtgctggggagtgccttggtgggtccttttattgagggtaacacgtctccactttggaacgcccctatcgcggttgcgttcgctggtctaatgcggggacattatagcagcatgataggattggcctacaatttttggatattgcaaaaccccaaaagaggaggtggtgagaccatgacccttggccaggtgtggaaaaagagactgaacatgcttgacaagaaggagtttgcaaaatacaagatttcagacattcatgaggtggaccgtaggcaagcacgtaccattctggacgcaggcatcaccaacgttggagtcagcgtgtcaagaggaacatccaagctgaagtggctgacagacagagggtactttaagccagaaggtagggttgtggatctcgggtgtggccgtggaggttggtcatacttggctgctgcagcaagagaaaccctggaagtgaaagcttacactctaggtgtgtcagggcatgagcgaccaattcaaatccaaagcctgggatggaatgttatcaagtttaaggacagagttgatgtgcacagacttccaatcgcccaatgtgacacagtgatgtgcgacattggagagtcttccagctcttgggaacaggagcgagagagaaccctgagggtaattgacctgatggagaactgggtggccaagagcagacccaaatactgcttcaaggttttggctccctactcctcagaagtgattgagcgtctggaactgtttcaaagaagatttggtggcgggataatcagggttccactctcacgcaactcaacccatgagatgtactacactagtgaggtcaccaataacattgtgcacatggtgaactgcgtctcaagattgctgctccggagaatgaccaaccccagtggaatagccatcttagagccagatgtggtttttccaacaggaacacgcaatgtcaagggggacttgggccccttggacatggagaagatcaagatgcgtgtatccaagttaaaaaaggagaacttggacacatggtggcatgatgaaaatcatccatacaggacctggcattaccttggaagctacgttgctaaacagagtggcagcgcagccactatggtcaatggaatagtcaagctactgagcatgccatgggataggattgaggatgttactgccttggccatgacagacacaacaccatatggacagcaacgtgtgtttaaggaaaaggttgacactagggctccaccccctcctccagggactaggaaaatcatgagcattaccaacacatggctctttgatttccttggccgaagcaaacaacctagactgtgcaccaaagcagagtttatagcaaaagtcagatcacacgctgccataggcaacatgttggaggagcaggaaggctggaaaaatgcagctgaggcagtgaatgatccaagattttgggaattggttagtgaagagagggagctacacttacaaggaaaatgctccacatgcatctacaacatgatgggaaaaagagagaagaaacccgctgaattcggacgtgccaagggaagcagagccatatggtacatgtggctcggagctaggttccttgaatttgaggccctgggtttcctcaatgaagatcattggttctccagagacaactccaagggtggtgttgaggggatgggcttgcagtacctaggctatgttgtggaagatgtgtggaagaaggggaatggaatcatgtatgcggatgacacagctggatgggacactaggataacagaggctgatttggaggatgaacaatacctgcttgaaaagatgagtggcactcacaagaaactggcttgggctattacagagttgacctacaagaacaaggtcgtcaaggtccctagacctggacctggaggaaagattctgatggatgtgattgccaggagggaccaaagaggttctgggcaggttgtcacctatcccctcaacactggaacaaatctcaagacacagttaataaggatggctgaaggcgagggcataatcaccccagaggacacactccaactcagtcacaagaatgagaaaaatttgagggaatggttgtgcacccatggtgctgaaagacttggtagaatggctgttagtggtgatgattgcattgttgcgccaattgatgagaggtttggcaacgccctaagtcatctcaatgccatgtcaaagattagaaaggacattgatgattgggagcccagcaagccttggatgaaatgggaggaggtgccattctgctcccaccatttccaccatttgctactgaaggatggcagaagaattattgttccatgccgaaaccaagatgagctgattggaagggcccgagtgtcaccaggaaatggatggatgatcaaagaaactgcatgccacagcaagtcctatggtcagatgtggctcctcatgtatttccataggagggatctgagattgatggctaacgcaatatcatcatgcgttcctatcaattgggtgccaactggaagaactacatggtcacttcacgctggaggagagtggatgacctccgaggacatgctggaagtgtggaacagagtttggattttggacaatcctcatatgagtgacaagtcagtaatcctagagtggagagatgttccatatctggcaaagagtgatgatatcaggtgtggatcattgatagggacatcacagagagcctgctgggcagctaacatccgttctgtggttgagaaaatcaggcatttggtgggagatgagaagtacaaagactacctgcactccatggacagatatgccctggaacactccgaaattggctgcttgatataaattaaagcactccattaaaccaaccaaacactccttcatcaaacaacactccatatttaaagtgtcaggccgggaaaccgccatggctaagctctgaggccatgcagtctgggagagcagcacattcttgcccacagttgtgcttaattacatttttgggagcctccctttgtcatgcgatgcatggtggcaaagcgacgaggactagtggttagaggagaccctccctgggctatgcatcaagtcggaccgtttctacgggaagctgtaaaccgtactgtccgtgacagcattccgaaaggttgggcgaagctgtaagcctgtaaaactttggagcctccgctctgcgacccgtgtaagcagagtcgatggggactagtggttagaggagaccctccacagcaaacaacacacacggatcacattgacaccagggatagaccggagattcttcttgcctctcgacagctttaggcaccgattgccaaactacgaagctgtcgagaaacgacaagaatct

SEQ ID NO: 14 - DNA, 11830 bp, Artificial Sequence
  synthetic
gggtcggcatggcatctccacctcctcgcggtccgacctgggcatccgaaggaggacgtcgtccactcggatggctaagggagagccacttttctctcgattctctatcggaatctagggagctcggatccagacatgataagatacattgatgagtttggacaaaccacaactagaatgcagtgaaaaaaatgctttatttgtgaaatttgtgatgctattgctttatttgtaaccattataagctgcaataaacaagttaacaacaacaattgctcgagggggggcccggtaccttgaagctgtccctgatggtcgtcatctacctgcctggacagcatggcctgcaacgcgggcatcccgatgccgccggaagcgagaagaatcataatggggaaggccatccagcctcgcgtcggcgcttaaggatcatgatgataaacaatgtatggtgctaatgttgcttcaacaacaattctgttgaactgtgttttcatgtttgccaacaagcacctttatactcggtggcctccccaccaccaacttttttgcactgcaaaaaaacacgcttttgcacgcgggcccatacatagtacaaactctacgtttcgtagactattttacataaatagtctacaccgttgtatacgctccaaatacactaccacacattgaacctttttgcagtgcaaaaaagtacgtgtcggcagtcacgtaggccggccttatcgggtcgcgtcctgtcacgtacgaatcacattatcggaccggacgagtgttgtcttatcgtgacaggacgccagcttcctgtgttgctaaccgcagccggacgcaactccttatcggaacaggacgcgcctccatatcagccgcgcgttatctcatgcgcgtgaccggacacgaggcgcccgtcccgcttatcgcgcctataaatacagcccgcaacgatctggtaaaccgtaaaatccgtacgcttgttttggcacactagtttgtgacataaggcttttgtcgcgcgtattgggtttaactttttttcgagaaatcgagaggtaagaagaattgaaagacattatgtctaacccttccgtcaggaggggtgtcaatgtgatggcggctcagaaaaaacgagtcgcccaaaaaataaaatcaatgaggaagggaacccagagcatcagcaatggagttaggggtttcatcctctttttcatatcccaaatcttctgggcacgtaagatcacgcccagagtgaaaggattgtggaaaaaactagacaaatttcaggcaatgaaggttttgaaagggctaaggaacatcatcaatggattgatgagatcggtcgctgggaaaaagaaacgccgtggagggaataccgtgccattcttagtgatgatgatggtagcaacaacatgggccgtcactctctccaactttcaagggaaggtgatgatgacggtgaacgctactgacgtcacagacattatcacgataccaacggccgctggaaagaacctgtgcattgtcagagctatggatgtggggcacatgtgtgatgatactatcacctatgaatgtccagtgttgtcggccggaaatgatccagaagacattgactgctggtgcacgaagttagcagtctacgttaggtatggaagatgcaccaagacacgacactcaagacgcagcagaaggtcactaacagtgcagacgcatggagagagcaccctatcgaacaaaaagggggcctggatggacagcaccaaggctacaaggtacttggtaaaaacagaatcatggatcttgagaaaccctggatatgccttggtggcagctgtcattggatggatgctcggaagcaacaccatgcagcgtgtcgtgtttgccgtgttactgcttttggtagctccagcttacagctttaactgtcttggaatgagcaacagagatttcctggagggagtgtccggagcaacatgggtggacttggtccttgaaggtgacagctgtgtgaccattatgtccaaggacaagcccaccatcgatgtgaagatgatgaacatggaggccgctaacttagcagaagtccgcagttattgctacttagccactgtcagtgaactctccaccaaggctgcgtgcccaaccatgggggaagcccataatgacaagcgggctgacccatcttttgtgtgcaaacaaggagtagtggatagaggttggggcaatgggtgcggactttttggtaaaggaagcatcgacacatgcgccaaatttgcctgttcaaccaaggcaacgggaaggactatcttaaaggagaacattaagtatgaggtggctatctttgtgcatggaccaactaccgtggaatcgcatgggaactacttcacgcaaaccggagctgctcaggctgggagatttagtatcacccccgcggcaccctcttacactcttaagctcggagagtatggagaagtaacagtggactgtgaaccacgctcagggatagacaccagtgcatactatgtgatgactgtcgggacaaagactttcttggtccaccgtgagtggtttatggacctcaacctcccctggagcagtgctgaaagtaatgtttggaggaacagagagacgctaatggagtttgaagaaccacacgctacgaagcaatctgtgatagcattgggctctcaagagggagccctgcatcaagctctggcaggagccattcctgtggaattttcaagcaacactgtcaagctgacgtcaggccacctgaagtgtagggtgaagatggaaaaattgcagctgaaggggacaacttatggcgtctgttcaaaggccttcagattccttgggactcccgcagacacgggccatggtactgtggtactggaactgcagtacacaggcacggatggaccctgcaagatacccatttcatcagtagcttcattgaatgacctaacgccagtgggcaggttagttaccgtcaacccctttgtctccgtgtcaacggccaatgctaaagtcctgattgagttggaaccaccctttggagattcgtacatagtggtgggaagaggagagcaacagatcaaccatcactggcacaagtctggaagtagcattggcaaagctttcacagccaccctcaagggagctcagagactagcagctctgggagacacagcttgggactttggatcggttggaggagtgtttacctccgtgggaaaggctgtccatcaagtatttggtggagcattccgctcattgtttggaggcatgtcttggataactcagggtctgctgggggccctcctattgtggatgggtattaacgctcgtgatagatccatagccctcacgttcctcgcggttggaggagttctgctctttctctccgtgaacgtgcatgctgagtacggttgctcattggacttccaaaggaaagaactgaagtgcggcgatggagttttcgtgttcaatgatgccaatgattggttgaccaagtacagatatcatcctgaagacccacgaacattggcttctctggtcaaggcttcatataaggccggacggtgtgggcttggatcagttgacaacatggaacataagatgtgggtgtccctggaaaatgagttgaatgccatctttgaggaaaaccaagaaaatatctcagtggtagtgaaggagagtaatggaatataccccaaaggaaattatccattcactggcactccagaaaagctgaaatatggatggaaaacatgggggaagaaattggtatttgccccggttttgagtaacaacacctttgtaatagatggaactcccgatgattgtccttacagcaacagagtttggaattcatttgagattgatgagttcggagcaggtttgactcataccagggtgtttttgaaacaaagactggaaagaaaagaagagtgtgacaatgcacttttaggagctgcagccaaaggggacgtggcagtccatggggatcccaacttctggatggcctcaaacaaaactggagaagtgtggcagatcaatgaattaatgtcactaaacctcaagcactgcacatggcccttgtctcatacgttgcatggcaatggagttctggaatcagacatgttcgttccgaaaagcattggaggaccggttagtcaccacaacttcattaaaggctacaaatctcaggtaaatggaccttgggcatcagtgcctctagaaatgcatcggagagagtgccctgacacagtggttcaaatagatcagaactgcagcgggagaggcaagtccacacggagcactacaaaggaagggaaaataatccgggattggtgttgtcgaaactgcacgctgccccctgttagctttgatggtcctgatggatgctggtatgctatggagattagaccgcagaagatgaatgaaaaacatttggtcacttcatgggtaagtgccggtgacgggatggaaaatggtaacattggattggtggctctctttgtgtgctttgacatgttcttgaagaacaagaacacccgaaagattagcttggttggagccttgtgtctattgggcgcaatgatccttgggaatgttggatttgttgatctaataaaattcatgattgtggttggtgaacatttccgctccttcaaccatggaggtgacgtctcctacttggtcctgaccgctgtctttgacatcaggccagccctgctctgcggctttgtgctgcgcaagaaatggagtcctagtgagagagtagtcatggccattggaatgatgctcctgcaaacggtgtgtggggattggactcagacatcttggtgggaatggctggatgctgttggattggggctcttgatcctcaatgcagtagctttacaaagatggaaaccggccattttggtcttgctgacaatgttgactccgctgaatatgcgagtaattcaaggtgctgcagggggagtgtgtggcgttatggtggccatgtctttgtggaaaacagaaggaagaagtctccgtaagagttacctgccagtcattggctatgttgcttcggcttttggatgggggtattcatggatcatggcagtgtacatcatgtgggcaacccatgtgtcaaggagatcttggcctgtaggagagctggcagcagcaattggacttttgggagctgcaatgggaatggcatccacaaaggatggagccatggtcatgccaatagctgtgctcggattaatcatggtgatcataggaatgacaggcaaatgcgatggaatggagattcgcaaagttgggtgtgtctcgtgggaagactccgctgagatcagtggttcaagctccaggtatgacgtggctcttagtgatggcggagaattccagctgttagagaattcgcggcccccctggaatcacatcattttcctcaccctgggaatgctggcgtcagcagtgcatccaatagtactgggtgtggtcatacttgcctgggggtggtttgcaggcaaaagccagcgcagtggagttttgtgggacgtgcctgttgctccaaaagttgaggaccatggaccccttgaggatggaatttacaccattttccagaatggattgtttgggagctcccaggctggagtaggagtggctcagggaggcgtgtttcacactatgtggcacgttactcgtggaggaatcctgctgcacaaaggtaaaagactcacccctggttgggctagtgtgaaaagtgacctcatttcgtatggaggtaaatggagacttgatggaagttgggatggagtcgaggaagttcagttgattgctgtccctcccaggaaaaatcctatcaatgttcaaactaagcccagcattttcaaattaaagagtggagaggagatgggagccatagctttggattaccctagtggaacttcaggatcacccattgtcaacagagctggagtcgttgtggggttgtatggaaatggaattgtgctcaatcagggtggttatgtgtcagctattagccaagcagctgtggaagaggtcagtagagatgagctacccggaattgaaggctacctgagaaaggggcaactcaccgttctggattttcacccaggggcaggaaagacacgtaacttcctgccccaaatcttgaaggcatgcaggacccgcaagttgcgaacactagtgctggccccaaccagagtggttctgagcgaaatgaaggaagctctgaatgatcacgatgtcaagtaccacacacaagctttctcatctgccagttcaggacgtgaactgattgacgctatgtgccatgcaacattggcatatagactattggaaagcactagggtgataaactgggaggttgtgataatggatgaggctcactacatggatccagccagcattgctgtgaggggttgggctgcccatagagctagagctcatgaatgtgcaacaatattcatgtcagcgactcccccagggactgcaaatgaatttcctgaatcaaatggaggcattgaggacatccgcaaggacatccccagtgaggcttggaacaaaggtcatgagtggatcctagaggatagaaggccaacggtgtggttcctgccctctataaggagcgcaaataacattgctgcatgtttgaggaaagccaacagaacggttgttgtgttaaacagacagacctttgaaagtgtgtaccccactatcaagacaaagaaaccggacttcatcctagccacagacattgctgagatgggggcaaatcttcatgtggaaagggtaattgactgccgaactgctttcaagccagtgctcagtgaggatcaggaacgggtaacactgaaagggccaatgagaatatcagcttctgcggcagctcagcgaagaggccgtgtggggagagatccatccagagagtctgacacatattactatggagaggacacctcagaggacaatgaccatttggtgtgctggactgaggcgtctatgattctggataacatggaaattaaagggggaatggtggctccgctgtacagcgtggaagccacaaagaccaaaatgacgccaggtgagtgtaggctaagagatgatcaaaggaaaacttttagagcattaataaagaaacatgagctgcctgtgtgggtctcatggaaggtggccaaagcaggaatcactccagatgataggaagtggtgttttgatggagaggaggacaacaccgtgcttaatgacatgggggagaaggtcatgggaagaagcccaggaggtgcaaagaaagctttgtgccctaggtggtcagacgcaaggctgactagtgacaatgcttccctcatgaacttcctggcatttgccgaggggaggagatcatacatgaggatcgttgacgctctcatcatggtgccccctatgctgaaagaaaaggtggtggatgcagcggacaccttagcactactactgcgttccgaggagggcagcagggcctacaaacttgctcaggagagcgctccagaagcgatcacaacactcatcatggtaaccttcctggttctgctatcagcaggactggttctgatgctcatgtggccaaaagggattagcaagatgtcattgggcatgctcaccatgagcgttgcgggataccttcttttggaaggagggctcacccaagtgcaggttgcaggaatattgctggtgtttttcatcttgatggtggttctaatccctgatgatggctcccagaggtcaatcaacgacaacaagctggcttacatgatgacaggaattatccttcttgttggagctgttgctgctaatgagatgggatggcttgaaaaaacgaaacaggatttgtttgggaaaagggaagaaatgccgggatggaactgggatttgggacttgacctaagacctggagcagcctggaccacttatgtggctctggcgactgtccttggcccagtgatagaccattggatacaagtggaatatggaagcgctagtttgactggcatagccaattcagcaggcatttccgcatttctggacaagggggttcctttcatgaaggtcaacatggcagtggtggttctgtttgtgagcgcatggaatagctattccatgctggccatcatggagggttgcctgatggcaggcattcatttttgcctgttaatccctgggctgaaggcaagagcaatgaagaaggcccaaaagaggatctatcatggtctatctaagaatccagtagttgatggcacacccactgtggatattgaagaagctgaagaaactccagtactgtatgagaagaaagtggctttggcactgctgggagttgtggctgcgctcaatggaattgtggtcagaacacctttctccatggctgaatcaattgtgctggggagtgccttggtgggtccttttattgagggtaacacgtctccactttggaacgcccctatcgcggttgcgttcgctggtctaatgcggggacattatagcagcatgataggattggcctacaatttttggatattgcaaaaccccaaaagaggaggtggtgagaccatgacccttggccaggtgtggaaaaagagactgaacatgcttgacaagaaggagtttgcaaaatacaagatttcagacattcatgaggtggaccgtaggcaagcacgtaccattctggacgcaggcatcaccaacgttggagtcagcgtgtcaagaggaacatccaagctgaagtggctgacagacagagggtactttaagccagaaggtagggttgtggatctcgggtgtggccgtggaggttggtcatacttggctgctgcagcaagagaaaccctggaagtgaaagcttacactctaggtgtgtcagggcatgagcgaccaattcaaatccaaagcctgggatggaatgttatcaagtttaaggacagagttgatgtgcacagacttccaatcgcccaatgtgacacagtgatgtgcgacattggagagtcttccagctcttgggaacaggagcgagagagaaccctgagggtaattgacctgatggagaactgggtggccaagagcagacccaaatactgcttcaaggttttggctccctactcctcagaagtgattgagcgtctggaactgtttcaaagaagatttggtggcgggataatcagggttccactctcacgcaactcaacccatgagatgtactacactagtgaggtcaccaataacattgtgcacatggtgaactgcgtctcaagattgctgctccggagaatgaccaaccccagtggaatagccatcttagagccagatgtggtttttccaacaggaacacgcaatgtcaagggggacttgggccccttggacatggagaagatcaagatgcgtgtatccaagttaaaaaaggagaacttggacacatggtggcatgatgaaaatcatccatacaggacctggcattaccttggaagctacgttgctaaacagagtggcagcgcagccactatggtcaatggaatagtcaagctactgagcatgccatgggataggattgaggatgttactgccttggccatgacagacacaacaccatatggacagcaacgtgtgtttaaggaaaaggttgacactagggctccaccccctcctccagggactaggaaaatcatgagcattaccaacacatggctctttgatttccttggccgaagcaaacaacctagactgtgcaccaaagcagagtttatagcaaaagtcagatcacacgctgccataggcaacatgttggaggagcaggaaggctggaaaaatgcagctgaggcagtgaatgatccaagattttgggaattggttagtgaagagagggagctacacttacaaggaaaatgctccacatgcatctacaacatgatgggaaaaagagagaagaaacccgctgaattcggacgtgccaagggaagcagagccatatggtacatgtggctcggagctaggttccttgaatttgaggccctgggtttcctcaatgaagatcattggttctccagagacaactccaagggtggtgttgaggggatgggcttgcagtacctaggctatgttgtggaagatgtgtggaagaaggggaatggaatcatgtatgcggatgacacagctggatgggacactaggataacagaggctgatttggaggatgaacaatacctgcttgaaaagatgagtggcactcacaagaaactggcttgggctattacagagttgacctacaagaacaaggtcgtcaaggtccctagacctggacctggaggaaagattctgatggatgtgattgccaggagggaccaaagaggttctgggcaggttgtcacctatcccctcaacactggaacaaatctcaagacacagttaataaggatggctgaaggcgagggcataatcaccccagaggacacactccaactcagtcacaagaatgagaaaaatttgagggaatggttgtgcacccatggtgctgaaagacttggtagaatggctgttagtggtgatgattgcattgttgcgccaattgatgagaggtttggcaacgccctaagtcatctcaatgccatgtcaaagattagaaaggacattgatgattgggagcccagcaagccttggatgaaatgggaggaggtgccattctgctcccaccatttccaccatttgctactgaaggatggcagaagaattattgttccatgccgaaaccaagatgagctgattggaagggcccgagtgtcaccaggaaatggatggatgatcaaagaaactgcatgccacagcaagtcctatggtcagatgtggctcctcatgtatttccataggagggatctgagattgatggctaacgcaatatcatcatgcgttcctatcaattgggtgccaactggaagaactacatggtcacttcacgctggaggagagtggatgacctccgaggacatgctggaagtgtggaacagagtttggattttggacaatcctcatatgagtgacaagtcagtaatcctagagtggagagatgttccatatctggcaaagagtgatgatatcaggtgtggatcattgatagggacatcacagagagcctgctgggcagctaacatccgttctgtggttgagaaaatcaggcatttggtgggagatgagaagtacaaagactacctgcactccatggacagatatgccctggaacactccgaaattggctgcttgatataaattaaagcactccattaaaccaaccaaacactccttcatcaaacaacactccatatttaaagtgtcaggccgggaaaccgccatggctaagctctgaggccatgcagtctgggagagcagcacattcttgcccacagttgtgcttaattacatttttgggagcctccctttgtcatgcgatgcatggtggcaaagcgacgaggactagtggttagaggagaccctccctgggctatgcatcaagtcggaccgtttctacgggaagctgtaaaccgtactgtccgtgacagcattccgaaaggttgggcgaagctgtaagcctgtaaaactttggagcctccgctctgcgacccgtgtaagcagagtcgatggggactagtggttagaggagaccctccacagcaaacaacacacacggatcacattgacaccagggatagaccggagattcttcttgcctctcgacagctttaggcaccgattgccaaactacgaagctgtcgagaaacgacaagaatct

SEQ ID NO: 15 - DNA, 56 bp, Artificial Sequence
  synthetic
ctataaatacagcccgcaacgatctggtaaacacagttgaacagcatctgttcgaa

SEQ ID NO: 16 - DNA, 32 bp, Artificial Sequence
  synthetic
ctataaatacagcccgcaacgatctggtaaac

SEQ ID NO: 17 - protein, 3342 aa, Karumba virus
  misc_feature (593)..(593): Xaa can be any naturally occurring amino acid
  misc_feature (1786)..(1786): Xaa can be any naturally occurring amino acid
  misc_feature (2123)..(2123): Xaa can be any naturally occurring amino acid
MQVKKIKMRGGGGGKLGIKGIKTSSLRRALNMVSGDLNETLLKLVIAMIAIWNELLRNLRSLGRRVRKETRQRTGNNKHVVACFIIGLMAALACAKTMNGIMDKGEHVWKADWNVDFTNVKLPKDFCGSGIHVEKMCPQVDSLQDATIDCAGRHDQFLLSYTRCAAKNRVKRGEPGVVEPKVTNIWTITFNDELNSIIERVSGMLKNNRLMATAVICLVGAFKKWPTWLVVLLVLLPWTVVQASLADPFLILPKGDGLVKTRLYPGQISSISTHVGVLDISYMAVDIEEGRLVERLMSHCEVNGTYSQDCCALGCNLDLSKLNERNRACQTATYNRGWATGCPVFGLGSVATCVEVACSDSVEVSELTSQNIRIPLSLRLQHEELNVTMTTEAPVTSKFSHHGVVSISCQIGNPGFLAQQYVLSNGKHKAMFPISAVSGWPGIREIGGQYRNVDGSVKWGHVEANEIKVAAVYSDSIQWKTGIPIKTGIRDPLYLYCEVSLTDLTFKKIRACESPVEVSFMAGPTGLDGRLEIGLLEQVNKTCSITGSCEGCTLPHPTSVISTSDKKGHMHVECRTGTFTAIFGKQKFSFTCXTSYLRTIWATTAQAIGNYRKFGLDASGGPFLDLWNKIGPNFSRLEVVGILVVAALLIDKRLLLLLAIFGYVTYVRADVGCGIDLSRKTFSCGEGIFLWNDLSSQTWAYGVEVVETKLLEAYISQMLKERTKVCLLCEDILQCSAARRLAAVVAKSNPDVYYNDSLSYGAVFPMRKKSQITITADGRSAVVASFVIEGMITNSALGKLQWNVWNPRPTAEAMDDKVIRVLTTGSNITSVCSKAIGFEYVFERFTRKMYGSSVLVKSTSHISHTCPTYLAGAAIKNNRTIHTDGFLWMDSALQANGTYRLSSLSVLQSHECEWPVTHTINPTDPKDRSLFMPARFGAPASRANHMPGYLTQRTIPWDKAPIKLIYGVAPGTTIKEFPTCDDRGDALPILSQETREWCCKTCLSKGTPPFHLVVDGSLYYPEEVRPIPIPTKITESVAQPVTPPPVMKTMGAEATQDFQMGPGEGTFARLALLALALHLISQNTRHGWITRVACAAMLFSVTGLPYHLRYWWPVIGFSVLKNASGQSLLVSLWLALHTTGGHLVCLGSLLRQTRWCYRLQSLMMLVASLSLYRFRGITWLMNIIDLVAPLISISFLYKARTLLLGEVVLIGSGLALSWGNALLTLGVLFGTHMVIASLRKTANAFEPGLRANISLCNFPQQVVRDMWTVLKNWRRAPAPWRSSGRTHISQLAVYLLLLGLAYAFHLLNLEVLAGACVLIGFLWILMGEMLTSGELELRRVSALEIPQGLEKIVIDRDFQSEYGRFTDAGVKLDNFNDETNVKFSLLSLGFVAALITVNPVCGLTIGFLIWIFTSCPLAKDLAMAASCFRSDDGFAVLIPGVKEVAIGTRFFTLSDGVYSVCRRSWNGLSHVGAGVAKNNVFHTLYHVTRGEAISWASEKVGPTSGCALRDVVTYGGDWQFPLVTEDEAVVKIVNSDLTVSHCYTNVLSLNVQGEEYGVIGHDFMEGSSGSPVFSSQGEIMGLYGYGFYDRENRYNSLISYMKMEKEEEKVKTTEEQPTMRGTRTFINWHPGKGKTRKVILEEAVRHVNENKRLLILTPTRVVMTEVLQALTGNLPFGVRVGKHLSKSRSFQITVACHATLTSHVLQHGLKINFSTVIMDECHFLDPLSIAARGIMEHMHSKGAALMYLSATPPGKAPQAGSNYPIIDVPSMPRDVDRNFVTSQAGXKTIVFVPTIAQAQKLSDQIPGSVVLSRETFDVNMSKAANPETKVVISTEISEMGANLGVDTVIDTRLCVRPVVDGRFKVRLVKVPITHASAVQRRGRTGRRQPGRYIFDDKVEPSDECSHWVCWREAQMLLDQLDMTPMPEEAENFDPPGHYKLLSDQLKQFMELLTTEMPIWLAWNWANASSSRHTVIFGGSEVTDKTTPVITTPSGKQLYNPQFVDDRFEADDLTKFHATIQKYLRMRAHINWEGLAQGLWHVVTKSDSSMFKVAFQNTMERLHDLSRWDDDSLRTSDMTESVGTWIIVMLTAVSTFIISLLIFACCRCCKSSKTTRSQEVVYTXTVAERNVSGLWSSMTVPVLGWVAGIPGPILFVVAVCLGLVCAFMCNSATRSYVDHTLSWWVMVLSCIVAGLVAFELDLMPRTFAILSRVAATGARFDTGPSVEPFIVTGRHVTVELWVVIMAMYLTALIIAPILKSYIQGKSIAAVFANEPVASAYIGGMRLTTIYALQATICVGLFYFHANLPSCVVASVASFLFLMVFAFDVKYAFSPAVVRALEAKNNKRDTDRPSLERDEETKGRQLYYTLSVVMVALWVTIVRDQLTFVTAAGVGLHALMCLIVPDHPFHRNINQGIVTMLFGFLVEPVKWTFIVGFFLWGVMHYTSPNSYRSSNKGDAMNVGMKWKRLLNSLNQKQFDAYKSRSVDETPRGDYVSRGGLKMREIMEVHGWEPNGKVVDLGCGRGGWSQHLAMDRRVTEIKGYTLGGSNRENPEVFMTYGYNLCTLKPMVDVYKLEPFVTNTVICDIGESDPSAVVEKTRTLKVLTLLENWLTVSKEANFVCKVLSPYHTEVLKKLETLQHVYGGRLVRLRLSRNSTAEMYYISGPRSNMVKAVYATLRALTGRLSLYDTPFESLPPTLPTGTRADPKAKAKAADFSLLARRIQKLQQENQHTWFHDKENPYTSFSYHGSFVTDAVSGGGQTVNPIIRRLMWPWEQVAKVTGFMMTDVSTYAQQKVLREKVDTYVEEPDHRMKQINRQLALFIADLYKKQGLRPRILSKQDFVANVRSDAAVGGWASDMPWADVEGAITDPVFWDMVDRERQLHLGGDCELCVYNTMGKKEKKPAVLGKAKGSRTIWYMWLGSRFLEYEALGFLNQDHWVSRDHLPCGVGGVGVNYFGNYLKEIAEKGKWLIADDVAGWDTRITESDIEDERSLLLSLVKDPYHKALMDSIFTMAYRNIVALFPRNHKKFGSGTVMDVVSRTDQRGSGQVVTYALNTITNAKVQLGRSLEAAGLLEADDRTIQVWLRNHGEETLRGMTVAGDDVVVATNSDSFHTSLHYLNRNSKIRKDIGPLEPSRRCDNWEEVEFCSHHFHPITLQDGRVLIVPCREQNEIIGRSRLQKGGIVSESEGACLAKAHGQMWALYFFHRRDMRLAYAAITACVPSHWFPKGRTSWSVHQKHEWMTTVDMLEVWNNVWIHDNPWMTNKEPVSSWSMVPYLPKKQDIACGSRIGTTDRTLWAKEMPELVSKLRRVLDKHEGPQQYTDGLAILGRYQQSPGNTADIYV

SEQ ID NO: 18 - protein, 3384 aa, Parramatta River virus
MSGLGGLLPLRGKKKKAPVIQSQGRVLPKSDWKGAPKQDLNKKKAKKDETKGQNWPRRINPRTGQWSAIEGSGARLWRSIFSTDLIGGLLLLIAILSNLYEKVRRDITELKRRVTRLEKSRASLILTPMVLLCLAILAAGVTIQVVVTTDARIELWSDRKNFTAHAHLVKVPTDVCNDGVFVTKHCPKVEKLSDLGEIDCGSSWSEFTLTYTRCVTLERASRAEEKGKTMLGQFKEDLSTLETEAFLLFKKHAFSTILVLLVLAIVMKWPVWVVVILGILAWNVVKGEFVEPFLVLKHDHSTMLMTRLYPGEIAHVATPAGLVDIRVSHAQIFGGQRFRELLSDCSVNASYSTDICPGGSQLDLESIKGPGRVCMTAPYNRGWGTGCFKWGIGAVATCVELNCTRETKVDLLTNSAIVANVTVNFHSTNDTKLLVPDTPITLKFGKLGTMTMTCRLGNDRIANDFYHVTDNIASGLFQKALIDAWEGPSKMANHISGHEKVVKWGHILPNEIKVSKIIEMELDWEKAITTHDGFSNTYFWCQVAVNKLVVGSFASCKSGAKASFIQSSWGFDGVVEVTLDEATKTICSLPLTCTGCSLLATKVVFLEGSQRAVGHVGCGNGTSMLTVGTTKVGIQCVVTPVSQIWNFVTHASGRYAKLGFGGVGGAFHDLLVKVGLTFTWDSWKIITVLSGLVVAFAIFDRKLVILIIILCGIAYTRADIGCGIDFDRKTYTCGSGLFVWKGLGKYPTADHSVEFASYDFLSAYLQEQFKSEKKVCIICEDIVQCEAARKAAAAVYKNLGHPFVYVNTSDSYGKVFAEIPKRVHTVSVGVDVVEMAMMTRENKPVGPFGDLPRSMVSWKSIPETEEHPVLRVLTSSSDYQKVCGKAIGFQYDFVGYRRTMYGSNVQLKISKKVSIECPTYLAGVAVKNDRTVFTDGMFWMSSKRENGTYAITELEMEQSHKCIWPDQYTPDATLTPRDNEMFVPPEWGGPMSKANHIPGYKMQTGFPWNKAPIRFVEGSVPGTIVTQISHCDGRGIAAEVNPATQPNWCCKSCTRIFHFEVDGKLYYPMEIRPDPKGGEQQKVPVVETPIGDEETETVGGWLGRMYNIPGAEGSYADFRLPKLPNSRPSAMVGSLVNLLCLMFSIQIVTKTMRARTLMRFYLCCLVFMFFGMPTLFGLSGFLAWMMILPISHNSVTMCNLTVHLWAVLLNQSSAMFLWGLTLRSQIQRSTAGQMLLFTMQMLHHAIYAHSWVFGWVIEVCLSVGLMMNLLTVIDTVHPKLIAYLLFFGWKTGMCVVCAWLLIYSIRRWNSIVAAAPAAGGWRSGYRTMMSSSLIVIFISVGIAGVIASDYGGYPAAAAVTAALLIMGIKMFDFLTTRLSLEFVSAGMFPEGVEKAFEPDSVSDLFRASFTVDGIKLQDHVEPIPILFAILYIFIGAVACKVNPALGIVYAIAMFATPLPELMRLYMMTIYSSTFRTDTLLGMAIPETEPELSQDFGPIPDGIYRVNNHGFSVKSHRGVGIVKNGVFHTLMHVTLNEPLAWQNRLVGPSMGHSLKDYVTYGGNWQLPDFDIVNEVGIMVCGRDRSIQYKRHEVGTIMIDDKRVMYFTHDYGHGSSGSPIFVNGEPVALYGFGFHLYNRYRSIVLPIPREEVLDGASNEGIPAEHGTMRNKFFVDWHPGKGKTRKVIVKEVLNALNLARRIVVLAPTRVVLAEITKAIGENTSKTPSKNLAFTGHNIVTVACHATFTDYVLRHGLSKFKAHEVIMDECHFLDPRSIAARGILEHLATKRGVKVTFMSATIPGREPSLGSNFEISEQALQFPRDVNQRWIETVARGKTVAFVPSHRVGDKLARGCPQAISLHRNNFDTNYSTAMDESIKFIYTTDISEMGANFSADTVIDFRVAIKPKISSEFAVTLEPTPITRSSMIQRRGRVGRQRPGTYIYPVDKGVEDASDQLACWTEAQMLLDQLDLTMMAEEVRQSNIPGAYKLVGRSLDIFRKLLEKDDIPIWLSWKWADSVQQQYSILFEGERQENVARVVNTRDYASLEYKPKFVDARFERLGWDQRKLSIQFYMNTRSFITFATLSHVISQVIEAGVVNSAWKRIGDVSIIFTEGGDPHAKDETIMAWTILVGGVLGALGFLIVAWGMKAVLRVIFGSRDKHLSVPTLVADFQPYIVCIVPIALHLAGVPIPMTIVFFAMLFLTYPLMYKSAGQRSYVDIDLVKWILLGGCIVTGVICWEMRLLPNISSDISAILNRQRQREDTPTFDASPPWEWLDLAQPVPHNVELTSVVITTFTTCLFLHQIVGWSYESEWLKSYFDHKGVGQIMGGFRLDTISWGSALSGLLGTATYASWGAILTGLGGAVVYFFLMVSMLKWNFSGGATTGLENNVMRNDRETGLGNRPANDNRRSLLYGVVAAECLVWLFCFRTATDAIVVACLVSYCLWIINNPASPHHKNTDLGSACSFIGLLYCTCPTQKCIQVLMRFALARLNMNTRSLEKSATGGLGHRWKKLLNAMTLLEFNAYRSCGVDETEKGDYVSRGGLKLREITMKYGWKPEGICVDLGCGRGGWSQHLAMDPRVTRVESFTLGGTARENPQPIKTLGHNLIRFKSGVNVYNMTPTHANTIVCDIGESDPKPEVETSRTLRVLKTLELWLARNPNAEFVCKVLCPYPVEVLKCLETLQHKYGGRIIRSTYSRNSSAEMYYISGGRNNMVKVIFTTLHSLISRIRTRPEKIVKESVSLPVGTRSDPGHKIKSMDPKMIATRVEKIKKEHADTWFVDNNHPYQSFRYVGSYVTDDVTPGGQTVNPLMRKMMWPWETVGGVVNFMMTDVSTYAQQKVLREKVDTLSPEPPNDIQRVNRWITEFLCASFMRRGLKPRILTMEQYINNVKSSAAIGSWSSDVPWSSVREALADKRFHQMVEEERKLHLAGDCRMCVYNTMGKKEKKPSAMGVAKGSRTIWYMWLGSRFLEYEALGFLNEDHWVSRDNLACGVGGVGVNYFGYYLQEIARKGKFFIADDIAGWDTRINESDLADEEFLIMSLICDPYHRSLAKAVFRFAYQNIVALFPRNHPGFGSGTVMDVVARTDQRGSGQVVTYALNTITNAKIQLGRMLEAEGLLDAHEHVIKKWLNDNGEEALSGMVVAGDDVVVATNNGNFSRSLRYLHLNGKIRKDIDPSLPSKVETNWEVVEFCSHHYHVMTLKDGRRIIVPCREQNEIIGRGRIQKGGLVTLAESACLAKAYGQMWALYFFHRRDLRMAFLAITSSVPIDWFPEGRTSWSIHQNKEWMTTEDMLRVWNTVWIQDNPWMEDKMEIENWRDIPYLPKSMDLKCGSLIGTKERAAWSKDLPSTVTAVRKIIDQDTKTENVYQDFLGGMGRFQTYTDPMAT

SEQ ID NO: 19 - protein, 3341 aa, Cell fusing agent virus
MKRKDLEARGKAPGRDFSTPFWGREGRRKDKEKGGESPSNRQVTLNTPIQSGRRAGKRQRVGLLGRLGVGWGSFLQEDIVQALIHMALVLHALFSSIDRRIRSLSRRVTALESRRTTGDPMTLAFILGFLTVLCGCVVIDMQVSTAKGTEIFEGKTNRTDYLHLVKLPADGCWSGILVTKKCPKVTDLAKDLESTDCGSTWTEFTLRYRRCAVKKREKRSREPPKADLLAEMEIIAFKTIRENKTIFIVALLCVAIAKRWPTWVVILLAIGTWTTVKGEFVEPLYTLKAEQMTMLQTIVRPEEGYVVATPNGLLEFKTGPAEIYGGQWLRELLADCHVNASYSTDVCPGGSQLNMADIMAKERVCSTQPYNRGWGTGCFKWGIGFVGTCVELHCDRGFNVSSIARSAIVMNVTASFHSVSDTQQMVGDIPLTFRFAKLGNAAMTCRLESEQLLLDYYHVTGSSHEGLFLRSQIDSWPGVHSTASGRHGMEKVVVWGDARSNEILVKNVIEPSLSWEDAIATHDGFRDISFVCQIMLDKLVSGAFRDCPGPKTSTFSQDGFGYSGVVITTLTASSNETCSLSLTCHGCLLQSTKMIFLAGKTTSRAFVKCGNHTSTLLVGSTSVSIECALNPISQGWRLARHVVDRYRRFGVSGVAGVWQDLVGKFSVGAFFSNTTLLVIFVLAALIDKRIAFLLVLGGYFYYVRADLGCGIDTTRKTISCGSGAFVWKHLGVGISNDHAVELEDYSFTDLYIKDMFSWTTKPCLICEDALQCVALRRAAFSAVGSMGPEQVYVNDTLARTFKFSETPKRTISVTINLIQYKFSSYVAHGRAEGDLGHLPTMFGSYPEKEADKVIRIVASRPDIRRLCGKAVSFQFKFTGFRRGLYGSNVQVEVSKNSSTECPTYLAGVVVKNGRTVITDGMFWLESTVLDGVAQITSLEMRQSHRCVWPREYTPDTLSDPSDQALFIPPAWGGPISRVNHIIGYKTQTDFPWNVSDITLIEGPAPGTKVKVDSRCHGRMHAQVIGPNDTESWCCQSCTRIVHFRVGDLLYYPMEIQLGTMSEAPEPNSKIFEEPIGEEPEPTVDDILKRYGKANAQSDFRRVSPRAGVGFDRSLLNLLCLAISLQLIGAKTRTSTLTRLFLTILAMALFGLPNLFSSVGLSAWVLLVASSSSQPQDLLMNLWIILQTGSSAVLLLGYMIRKKLSIVLGVHHLVTLMCIQFLFSAVDRYQKYLYGLLELMASVVLLSAYKSVLQALPPEVLCFSLIMGWKTALSLATVVSLIFSLNAMYKYACQYHNPRNGYRDSGANLWFWTVSLASAGGIWAAEKAHQPTVAAVLAFTMIVLFLYMEQTNVSMELEFISAGETPEGVSTENDDGMNIPDLKGRYGEDGIVVGAASSSGHLPELVFVFLLGFAVTSTSYFLGALYLLIATSTNLPVTIIRMLRMKLTANNRSDDLLGLGGPIETDLQTSFQDIPNGVYRIVVRSLFGDRQRGAGFSKNGVFHTLMHVTRGEPVKWRGRVVVPHSGSALRDVVSYGGPWQLDTPTTTEDLVLMACKPDKTVEYHRYRPGVMSIDGEPVMFISDDFGKGSSGSPFFINGEPVGFYGFGFYVNGIYRSTVAGGKPTDVTENLDCDSTRRFVTWHPGKGKTRKVIVEETKKNYDSNQRTVILTPTRVVMAEVVEALKNSGMRSDKNLSYCTRNLITVACHATFTKFVLSHGAKKVRVAMIIMDECHFMDPMSIAARGIMEHLHSQGTKLIYLSATPPGHAPDTGSNYAISDQSISFPTWLSPAWIGNVQKSVGAKKTILFVPSHNQANTLASAIPGSVPLHRANFSTNYAQAGDAATALVISTDISEMGANLGVDLVIDTRRALRPLVDSATRVKLVETNITTSSMIQRRGRTGRREPGTYVYPIDSQTEENPVSWACWPEAQMILDQLGMTFMLEEAAYSQPPGRFTLVGEDRMRFSKLMDRDDIPIWLAWHWAEAGDRRHSALFQGEGTGKIIENRFGKQEYRPQYVDDRFESVEWETRKVSIDFYMNCRGGPSLYEFFTLIDWTDIWRRTTSALWDLSDVMNGELRDRSTTERSLTVLMAFVLGVSIVLSCFIAVWALCFLFSLFRPRKVTYEQMPSSDPLSGGVLVSTPSLLYYMGVPLGFCVVISLAMFLVYPVLYKSIGNRSYMDSDLVKWVILGSCLICGVLAWEMRMFPNIRGDLMELVKAVKEPEEVVNSGPFFPSWEIARGKGATMLDSLQVFFFITVLSTKFLYWFQENWTARMYAMKHPEMVSSIGGFRFDEIPFRAVLPSGFAIVAIASLSSVVVGLLAAGVFMAIMYCQNKWNATPKILTALDARDQRHDRPTEITSRVPLENTRSIMYAFCLIFSLFWAFCTRSPGDFLRGSLVVGASMWQILHPRSKIHDVMDFGSMVSAIGLLEMNYLFYRFMHIAARALGAVAPFNQFRALEKSTTIGLGMKWKMTLNALDGDAFTKYKSRGVNETERGDYVSRGGLKLNEIISKYEWRPSGRVVDLGCGRGGWSQRAVMEETVSSALGFTIGGAEKENPQRFVTKGYNLATLKTGVDVHRLTPFRCDTIMCDIGESDPSPIKEKTRTLKVLQLLENWLLVNPGAHFVCKILSPYSLEVLRKIESLQHLYNGRLVRLSHSRNSSAEMYYISGARSNVVRTTYMTLAALMARFSRHLDSVVLPSPVLPKGTRADPAASVASMNTNDMTDRVERLMNENRGTWFEDQQHPYKSFKYFGSFVTDDVKVGGQAVNPLVRKIMWPWETLTSVVGFSMTDVSTYSQQKVLREKVDTVIPPHPQHIRRVNRTITKHFIRFFKNRNLRPRILSKEEFIANVRNDAAVGSWSRDVPWRDVQEAIQDQCFWDLIGKERALHLQGKCEMCIYNTMGKKEKKPSLAGEAKGSRTIWYMWLGSRFLEFEALGFLNADHWVSREHFPGGVGGVGVNYFGYYLKDIASRGKYLFADDIAGWDTKISAEDLEDEEALLTALTEDPHHRALMAATMRLAYQNIVAMFPRTHSKYGSGTVMDVVGRRDQRGSGQVVTYALNTITNGKVQVARVLESEGLLHADESVLDAWLEKHLEEALGNMVIAGDDVVVSTDNRDFSSALEYLELTGKTRKNVPQGAPSRMESDWEKVEFCSHHYHEMCLKDGRILIAPCRHENEVLGRSRLQKGGVVSISESACMAKAYAQMWALYFFHRRDLRLGFIAISSAVPTNWFPLGRTSWSVHQHHEWMTTDDMLRVWNDVWVHNNPWILNKESIESWDDIPYLHKKQDITCGSLIGVKERATWAREIENSVISVRRIIDAETGVLNTYKDELSVMSRYRRGNDVI

SEQ ID NO: 20 - protein, 3337 aa, Artificial Sequence
  Synthetic
MSKKPGGPGKSRAVNMLKRGMPRVLSLTGLKRAMLSLIDGRGPTRFVLALLAFFRFTAIAPTRAVLDRWRSVNKQTAMKHLLSFKKELGTLTSAINRRSSKQKKRGGKTGIAFMIGLIAGVGAVVVIDMRVTYDGQVQIYRDGENMTDRVALFKLPTDGCSVGLPVSKMCHKVDKNMKEGLADTDCGSTWAEFRLRYQRCQVKTRAKRVAPDGPKQDFLAEVEIVAFKAIRENKSVLLVVVLCVAIAKRWPLWVLILLSIGTWTTVRGEYMEPLYVLKADQMTMIQTTLRPEEGYVTATANGLFEMKTGRAFIYGSQVVKTLVTDCEVNATYSTDICPGGSQLSMQDIQAEGRACASEPYNRGWGTGCFKWGVGFVATCAEVDCTTSVKVSSVARSTIKMNVTATYHSVKSVQSVISDVPVTFQFGQLGIASMTCRLESDRIAQSYYHVEGNKKEGLFMKEQIDGWNGATLAAGKIANTEKIVIWGDVKPNEILVKAVSEPQLEWTNAIATHDGFRDVGFVCQIMLDKLVTGVFKDCKTPKTSTFTQSGFGFDGIITTTLAVAQTEACSISISCKGCTLLATKAVFSAGDIESKTWVRCGNESGTAIVGGQEVAVACATNPITQGWRLVKHATQRYRKFGMPGVGGVFHDLVGTLNPWSFFSTTTLVFMAVVLFIVDKRILILGIACYMFYFVRADTGCAIDISRQELRCGSGVFIHNDVEAWMDRYKYYPETPQGLAKIIQKAHKEGVCGLRSVSRLEHQMWEAVKDELNTLLKENGVDLSIVVEKQEGMYKSAPRRLTATTEKLEIGWKAWGKSILFAPELANNTFVIDGPETKECPTQNRAWNSLEVEDFGFGLTSTRMFLRVRESNTTECDSKIIGTAVKNNLAIHSDLSYWIESRFNDTWKLERAVLGEVKSCTWPETHTLWGDGVLESDLIIPITLAGLRSNHNRRPGYKTQSQGPWDEGRVEIDFDYCPGTTVTLSESCGHRGPATRTTTESGKLITDWCCRSCTLPPLRYQTDNGCWYGMEIRPQRHDEKTLVQSQVNAYNADMIDPFQLGLLVVFLATQEVLRKRWTAKISMPAILIALLVLVFGGITYTDVLRYVILVGAAFAESNSGGDVVHLALMATFKIQPVFMVASFLKARWTNQENILLMLAAAFFQMAYYDARQILLWEMPDVLNSLAVAWMILRAITFTTTSNVVVPLLALLTPGLRCLNLDVYRILLLMVGIGSLIREKRSAAAKKKGASLLCLALASTGFFNPMILAAGLVACDPNRKRGWPATEVMTAVGLMFAIVGGLAELDIDSMAIPMTIAGLMFAAFVISGKSTDMWIERTADISWEGDAEITGSSERVDVRLDDDGNFQLMNDPGAPWKIWMLRMACLAISAYTPWAILPSVVGFWITLQYTKRGGVLWDTPSPKEYKRGDTTTGVYRIMTRGLLGSYQAGAGVMVEGVFHTLWHTTKGAALMSGEGRLDPYWGSVKEDRLCYGGPWKLQHKWNGQDEVQMIVVEPGKNVKNVQTKPGVFKTPEGEIGAVTLDFPTGTSGSPIVDKNGDVIGLYGNGVIMPNGSYISAIVQGERMDEPVPAGFEPEMLRKKQITVLDLHPGAGKTRRILPQIIKEAINRRLRTAVLAPTRVVAAEMAEALRGLPIRYQTSAVAREHNGNEIVDVMCHATLTHRLMSPHRVPNYNLFVMDEAHFTDPASIAARGYISTRVELGEAAAIFMTATPPGTSDPFPESNAPISDLQTEIPDRAWNSGYEWITEYIGKTVWFVPSVKMGNEIALCLQRAGKKVIQLNRKSYETEYPKCKNDDWDFVVTTDISEMGANFKASRVIDSRKSVKPTIITEGEGRVILGEPSAVTAASAAQRRGRIGRNPSQVGDEYCYGGHTNEDDSNCAHWTEARIMLDNINMPNGLIAQFYQPEREKVYTMDGEYRLRGEERKNFLELLRTADLPVWLAYKVAAAGVSYHDRRWCFDGPRTNTILEDNNEVEVITKLGERKILRPRWIDARVYSDHQALKSFKDFASGKRSQIGFIEVLGKMPEHFMGKTWEALDTMYVVATAEKGGRAHRMALEELPDALQTIALIALLSVMTMGVFFLLMQRKGIGKIGLGGVVLGAATFFCWMAEVPGTKIAGMLLLSLLLMIVLIPEPEKQRSQTDNQLAVFLICVLTLVGAVAANEMGWLDKTKSDISGLFGQRIETKENFSIGEFLLDLRPATAWSLYAVTTAVLTPLLKHLITSDYINTSLTSINVQASALFTLARGFPFVDVGVSALLLAAGCWGQVTLTVTVTSATLLFCHYAYMVPGWQAEAMRSAQRRTAAGIMKNAVVDGIVATDVPELERTTPIMQKKVGQVMLILVSLAALVVNPSVKTVREAGILITAAAVTLWENGASSVWNATTAIGLCHIMRGGWLSCLSITWTLVKNMEKPGLKRGGAKGRTLGEVWKERLNQMTKEEFIRYRKEAITEVDRSAAKHARKERNITGGHPVSRGTAKLRWLVERRFLEPVGKVIDLGCGRGGWCYYMATQKRVQEVRGYTKGGPGHEEPQLVQSYGWNIVTMKSGVDVFYRPSECCDTLLCDIGESSSSAEVEEHRTLRVLEMVEDWLHRGPKEFCVKVLCPYMPKVIEKMELLQRRYGGGLVRNPLSRNSTHEMYWVSRASGNVVHSVNMTSQVLLGRMEKKTWKGPQYEEDVNLGSGTRAVGKPLLNSDTSKIKNRIERLRREYSSTWHHDENHPYRTWNYHGSYEVKPTGSASSLVNGVVRLLSKPWDTITNVTTMAMTDTTPFGQQRVFKEKVDTKAPEPPEGVKYVLNETTNWLWAFLAREKRPRMCSREEFIRKVNSNAALGAMFEEQNQWRSAREAVEDPKFWEMVDEEREAHLRGECHTCIYNMMGKREKKPGEFGKAKGSRAIWFMWLGARFLEFEALGFLNEDHWLGRKNSGGGVEGLGLQKLGYILREVGTRPGGRIYADDTAGWDTRITRADLENEAKVLELLDGEHRRLARAIIELTYRHKVVKVMRPAADGRTVMDVISREDQRGSGQVVTYALNTFTNLAVQLVRMMEGEGVIGPDDVEKLTKGKGPKVRTWLSENGEERLSRMAVSGDDCVVKPLDDRFATSLHFLNAMSKVRKDIQEWKPSTGWYDWQQVPFCSNHFTELIMKDGRTLVTPCRGQDELVGRARISPGAGWNVRDTACLAKSYAQMWLLLYFHRRDLRLMANAICSAVPVNWVPTGRTTWSIHAGGEWMTTEDMLEVWNRVWIEENEWMEDKTPVEKWSDVPYSGKREDIWCGSLIGTRARATWAENIQVAINQVRSIIGDEKYVDYMSSLKRYEDTTLVEDTVL

SEQ ID NO: 21 - DNA, 11692 bp, Artificial Sequence
  synthetic
gggtcggcatggcatctccacctcctcgcggtccgacctgggcatccgaaggaggacgtcgtccactcggatggctaagggagagccacttttctctcgattctctatcggaatctagggagctcggatccagacatgataagatacattgatgagtttggacaaaccacaactagaatgcagtgaaaaaaatgctttatttgtgaaatttgtgatgctattgctttatttgtaaccattataagctgcaataaacaagttaacaacaacaattgctcgagggggggcccggtaccttgaagctgtccctgatggtcgtcatctacctgcctggacagcatggcctgcaacgcgggcatcccgatgccgccggaagcgagaagaatcataatggggaaggccatccagcctcgcgtcggcgcttaaggatcatgatgataaacaatgtatggtgctaatgttgcttcaacaacaattctgttgaactgtgttttcatgtttgccaacaagcacctttatactcggtggcctccccaccaccaacttttttgcactgcaaaaaaacacgcttttgcacgcgggcccatacatagtacaaactctacgtttcgtagactattttacataaatagtctacaccgttgtatacgctccaaatacactaccacacattgaacctttttgcagtgcaaaaaagtacgtgtcggcagtcacgtaggccggccttatcgggtcgcgtcctgtcacgtacgaatcacattatcggaccggacgagtgttgtcttatcgtgacaggacgccagcttcctgtgttgctaaccgcagccggacgcaactccttatcggaacaggacgcgcctccatatcagccgcgcgttatctcatgcgcgtgaccggacacgaggcgcccgtcccgcttatcgcgcctataaatacagcccgcaacgatctggtaaacagtagttcgcctgtgtgagctgacaaacttagtagtgtttgtgaggattttgaacaattaacacagtgcgagctgtttcttagcacgaagatctcgatgtctaagaaaccaggagggcccggcaaaagccgggctgtcaatatgctaaaacgcggaatgccccgcgtgttgtccttgactggactgaagagggcaatgttgagcctgattgacggtagggggcccacacggtttgtgttggctctcttggcgttttttaggttcacggcaattgctccgacccgggcagtgctggatcgatggagaagtgtgaacaaacaaacagcgatgaaacatctcctgagtttcaagaaggaactaggaaccttgaccagtgctatcaaccggcggagctcaaaacagaagaagagaggaggaaagaccggaattgcattcatgattggcttgattgctggcgtgggagcagttgtggtgattgacatgcgtgtgacgtatgacggacaagtgcagatttatcgcgacggagagaatatgacagatcgagttgcgctctttaagctgccaactgacggttgttcagttgggttgccagtttcaaagatgtgccacaaagtggataaaaacatgaaagaaggattagcggacacggattgcggatcaacatgggcagagtttaggttgagataccaacgatgccaagtgaagacacgagcgaagcgagttgcgccagatggcccaaagcaagactttttggcagaagtggaaatagtggcttttaaagccatccgggaaaacaaaagtgtgttgcttgtggtcgtgttgtgcgtggccatcgcgaaaagatggccattgtgggtgttgatactactgtcgattggaacatggacaacggttcgaggagaatacatggaaccgttgtatgtattgaaagcagaccagatgacaatgattcagacaacgttgaggccagaagagggatacgtgacagcgacggcaaatgggttatttgagatgaaaacaggaagagcgttcatctatggaagccaagtggtgaaaacactggtaactgactgtgaagttaacgcgacatattcaactgatatatgcccaggcggatcgcagctgtcaatgcaggacattcaagcggaaggaagagcatgtgcctcggagccgtataatcgaggctggggcactgggtgttttaagtggggagttggattcgtagcaacatgcgcggaggttgattgcaccactagtgtgaaagttagctcagtggctcgctcgacaattaagatgaatgtgacggcaacataccactcagtgaaaagtgtgcagagtgtgataagtgatgtacctgtgacattccaatttgggcagctgggcattgcctctatgacatgtcgtttggagtccgaccgaattgcccaatcatactatcacgtggaaggaaacaagaaggagggactattcatgaaggaacagattgatggatggaacggagccacgttggctgctggaaagatagccaacacagagaaaattgttatttggggagatgtgaaaccaaatgaaattttggttaaggcggtttcagaaccccaactggaatggactaatgctatagctacacatgatggcttccgagatgtgggatttgtttgccagataatgcttgacaagcttgttaccggagtgtttaaagattgtaagacccctaaaacgtccacattcacacaaagcggatttggctttgacggaattataactaccacgttagctgtcgcccaaactgaagcctgctcgatcagcatctcctgtaaaggatgcacgcttttggcaacaaaagcagtgttttccgctggggatattgagtcgaagacatgggtgcgatgcggaaacgagagtggaacagcgatcgttggaggacaagaagttgccgttgcgtgcgccacaaatcccatcacgcagggatggagattggtgaagcatgctactcaacgttaccggaagtttggaatgccaggagtaggtggagtattccacgatttagtgggaacattaaatccatggagtttcttctctaccacgactctggttttcatggcggtagtccttttcatcgtggacaaaagaatcttgattttggggatagcttgttatatgttttattttgtgcgagccgatactggatgtgccatagatataagtcggcaagagttgaggtgtggcagcggagtatttatacacaatgatgtggaagcttggatggaccgatacaagtactaccctgaaacaccacaaggtctagctaagatcattcaaaaggctcacaaggaaggagtgtgcggtctacgatcagtttctagattggaacaccaaatgtgggaagcagtgaaggatgaactaaacactcttttgaaggaaaatggtgtggaccttagtattgtggttgagaaacaggaggggatgtacaaatcagcacctagacgcctgactgccaccactgagaaactggaaataggctggaaagcctgggggaagagcattctgttcgcaccagaactggccaacaacacttttgtgattgatggtccggagaccaaggagtgtccaacccagaaccgtgcctggaacagcttggaggtggaagattttggattcggcctcaccagcactcggatgttcttgagggtcagagaaagcaacacgactgaatgtgactcaaagatcatcgggacagccgtcaagaataacttggcgatccatagcgatctatcctactggattgaaagcaggtttaatgacacgtggaagctcgaaagggcggtcctaggtgaagtcaaatcatgcacgtggccggaaacacataccctgtggggtgacggggtccttgagagtgacctaataataccaatcacgctagcgggactgcgaagcaaccacaaccggaggcctgggtataaaacacaaagccagggtccatgggatgaaggtcgagtggagattgactttgattactgtccagggacaacggtcactctgagtgagagctgcgggcatcgtggacctgccacccgcaccactacagagagtggaaagctgataacggactggtgctgtaggagctgcaccttacctccattgcgctaccagacagacaatggttgttggtatggcatggagattaggccacagagacatgatgaaaaaactcttgtgcagtcacaggtgaatgcctacaacgctgacatgattgatccttttcagctgggccttctggtcgtgttcttggccacccaggaggtccttcgcaagaggtggacagccaagatcagcatgccagccatactgattgccctgctagttctagtgtttgggggcatcacttacactgatgtgttacgctatgtcattctggtgggggcggcctttgcagaatccaactcaggaggagatgtggtgcatctggcgctcatggcaaccttcaagatacaaccagtgttcatggtagcatcatttctcaaggcgagatggaccaaccaagaaaacattctgctgatgttggcagctgctttcttccaaatggcttactatgatgcccggcaaattttgctttgggaaatgcctgatgtattgaattcattggcagtggcttggatgatattgagagcgataacgttcaccacaacatctaatgtggtcgtcccgctgctggccttgttaacacctggattgagatgcctaaacctggatgtgtacaggatcctgctactgatggttggaataggcagtttgatcagggaaaaaagaagtgcagctgcaaaaaagaaaggagccagtctgctatgtttggctctagcctcaacaggattttttaaccccatgatccttgctgctggacttgtcgcatgtgatcccaatcgcaagcgggggtggcctgcaactgaagtgatgacagctgtcggcttaatgtttgccatcgttggagggcttgcagaactggacatagactccatggccattccaatgactatcgcagggctcatgtttgctgcttttgtgatctctggaaaatcgaccgacatgtggattgagaggacagcggacatctcctgggagggtgatgcggaaatcacaggttccagtgaaagagttgatgttcggcttgacgatgacgggaacttccagctcatgaatgatccaggagcaccttggaaaatatggatgctccgtatggcttgcctggcaatcagcgcgtacaccccttgggctattttgccttcagtagttggattttggataactctccaatacacaaagagaggaggtgtgctgtgggacactccctctccaaaggagtacaagagaggggacacgaccactggtgtctataggatcatgactcgtggattacttggtagttaccaagcaggagcaggcgtgatggttgaaggtgttttccacaccctctggcacacgacaaaaggagccgctctgatgagcggagaaggccgcctggatccatattggggcagcgtcaaggaggatcgactttgttatggtggaccctggaaactgcagcacaagtggaatgggcaagatgaggtgcaaatgattgtggtggaaccagggaagaatgtcaagaacgtccagactaagccgggggtgttcaaaacacctgaaggggagatcggggccgtgactctggatttccccactggaacatcaggctcgcccatagtggacaaaaacggtgatgtgattgggctttatggcaacggagtcataatgcccaatggctcatacataagcgcgatagtgcaaggtgaaaggatggatgagccggttcccgccggattcgaacctgagatgttgaggaaaaaacagatcaccgttttggatcttcaccctggtgctggtaaaacaaggaggattctgccacagatcatcaaagaggctataaacaggaggctgaggacggctgtgctggcgccaactagggttgtggccgctgagatggctgaagccctaagaggattgcctatccgataccaaacatctgcggtggccagagagcacaatggaaatgagatcgtcgacgtcatgtgccatgcaaccctcacccataggctgatgtctcctcatagggtgcctaattacaacctatttgtgatggacgaggcccacttcaccgacccagccagcatcgcggctagaggatacatttccacgagagttgagctgggggaggcagctgcaatattcatgactgccaccccaccaggtacctcagacccatttccagagtccaatgcaccaatatccgacttacagaccgaaatcccggaccgagcctggaactcagggtatgagtggattacagaatatatcgggaagacggtttggtttgtgcctagtgtgaagatgggaaatgagatagccctctgtctgcagcgcgctggcaaaaaagtcatccagctaaacagaaagtcgtacgagacagagtatccaaaatgcaagaacgatgattgggactttgtcgtcacaacagatatatctgagatgggagcaaactttaaggcaagcagggtgattgacagccggaagagtgtgaaaccgactatcatcacggaaggagagggaagagtgatcttgggggaaccatccgctgtgacggcagccagtgcagcccagagacgaggacgcattggtaggaatccatcacaagttggagatgagtactgctatggagggcacacgaatgaggatgactcgaactgtgctcactggactgaggcacgaatcatgctcgataacatcaacatgccaaacggattgattgctcaattctaccaaccagagcgcgagaaggtatacaccatggacggggaataccgacttagaggagaggagaggaaaaacttcctggaattgttgagaactgcagacttgccagtatggctagcttataaggtggcagcagctggggtgtcatatcatgaccggaggtggtgttttgatggccctaggacaaatacaatccttgaagacaacaatgaagtggaagtcatcacaaagcttggtgaaaggaagattctgaggccacgctggattgatgcaagggtgtactcagaccatcaggcgctgaaatcattcaaggacttcgcctcagggaagcgctctcaaataggttttatcgaggtccttggaaagatgcctgaacatttcatggggaagacatgggaagcactcgacaccatgtatgttgtagccactgcagagaaaggaggaagagctcacagaatggctttggaggagctaccagacgccctccaaacaatagctctgatcgctctgttgagtgtgatgaccatgggagtgttttttcttctcatgcagaggaagggcatcggaaagataggcctgggaggcgttgtcctgggagccgcaacctttttctgttggatggctgaagtaccaggaacgaagattgccggaatgctgctgctttccctccttctgatgatcgtgttgattcctgagccagagaagcaacgctcgcagacagacaaccagctagctgtgttcctgatttgcgtgttgacccttgtgggtgcggtggcagccaatgagatgggttggctggacaagaccaagagtgacataagcggtctgtttgggcaaagaattgaaaccaaggagaattttagcattggggagttccttttggacctgaggccggcaacggcttggtcactgtatgctgtgactacagcagttctcactcccttgctaaagcacttgatcacgtcagactacatcaacacctcattgacctcaataaatgttcaagctagtgcgctattcacgctcgcgcgaggcttcccttttgtcgatgttggagtatcggctctcctgctagcagccggatgctggggacaagtcactctcaccgtgacggtgacatcagcaacacttctgttctgccattatgcctacatggtacctggatggcaggctgaggcaatgcgctcagcccagcgacgaacagccgctggaatcatgaaaaacgctgtggtagacggcatcgtggccacggacgttccagagctagagcgtaccacacccatcatgcagaagaaggttggacaagttatgctgattttggtgtctcttgccgcattggtggtaaacccgtctgtgaagacagtgcgggaagccggaattctgattacggcagcagctgttaccctctgggagaacggagcaagctctgtgtggaacgcaacaaccgccataggactttgtcacatcatgcgcggaggctggttatcgtgtttatccataacatggactcttgtaaaaaacatggaaaaaccagggctgaagagaggtggggcaaaaggacgcaccttgggggaggtttggaaagaaagacttaaccagatgacgaaagaagaattcatcaggtaccgtaaagaagccatcactgaagttgaccgctcagcagcaaaacacgctaggaaggaaaggaatatcactggagggcatccagtttctagaggcacggcaaagctaagatggctggtcgagaggaggtttcttgaaccggtcggaaaagtgatcgaccttggatgtggaagaggcggctggtgttattacatggccacacaaaaaagagtccaagaagtcagagggtacacaaaaggtggtcccggacatgaagagccccagctagtgcagagctatggatggaacattgtcaccatgaagagtggggtggatgtgttctataggccttctgaatgttgtgacactctcctttgtgatatcggagagtcctcatcaagtgctgaagttgaagaacatagaacgctacgagtccttgaaatggtggaagactggttgcatcgagggccaaaggaattttgtgtgaaggtactgtgcccctacatgccaaaggtcatagaaaagatggagctgctccaacgccggtatggcgggggattggttaggaacccactctcacggaattccacacatgaaatgtattgggtgagtcgagcctcaggcaatgtggtgcactcagtgaacatgaccagccaggtactcttaggaaggatggagaagaagacctggaagggacctcagtacgaagaagacgtgaacttgggaagcggaacgagagcagtgggaaaacctctactcaactcagacaccagcaagataaagaacaggattgaacgacttaggcgtgagtacagctcgacatggcatcatgatgagaaccacccatatagaacctggaactaccacggtagctacgaagtgaagccaacaggctctgcaagctcactggtcaatggagtggtcaggctcctctcgaaaccatgggacaccatcacaaatgtcaccacaatggccatgacggacaccaccccttttggacaacagcgagtgttcaaagagaaggtggacacgaaagctccggaaccgccagaaggagtgaagtatgtgctcaatgaaaccaccaactggttgtgggcgttcctggcacgagaaaagcgtcccagaatgtgctcgcgagaggaatttataaggaaggtcaatagtaatgcagctctgggcgccatgtttgaggagcagaatcaatggaggagtgctagagaagcggttgaagatccaaaattctgggaaatggtggatgaagagcgtgaggcgcacttacgcggagaatgtcatacttgcatttacaacatgatgggaaagagggagaaaaaacccggagagtttgggaaagccaagggaagcagggccatctggtttatgtggctgggagctcgcttcctagagtttgaggctctgggctttcttaatgaggaccactggcttggaagaaagaactcggggggcggggtcgagggtctgggcctccagaaattaggctacatcctgcgtgaagttggcacccgacccggaggcagaatctacgctgatgacacagccggttgggacacccgcatcacaagagctgacctggagaatgaagccaaggttcttgagttgttggacggggagcaccggcgcctggccagggccatcattgagctcacctatcgccacaaagtagtgaaggtaatgcgcccggctgctgatggaagaaccgtcatggacgtcatctccagggaagaccagagaggaagtgggcaagttgtcacctacgctctaaacacctttaccaacctggctgtccaattggtgagaatgatggaaggagagggtgtgatcggcccagatgatgtggagaaactcacaaaggggaaagggcccaaggttagaacctggctgtctgagaatggggaggaaagactcagccgcatggctgtcagtggagatgactgtgtggtaaagcccttggatgatcgctttgccacctctctccactttctcaacgccatgtcaaaggtgcgcaaggacatccaagagtggaaaccatcaaccggatggtatgattggcagcaagttccattctgttcaaaccacttcactgaactgatcatgaaagatggaagaacactggtgactccatgccgagggcaggatgagttagtgggcagagctcgcatctccccaggggctggatggaatgttcgagacactgcttgcttagccaaatcttatgctcagatgtggttgctcctgtacttccacagaagagatctgcggttgatggccaacgccatctgctctgccgtacctgtaaactgggtccctactggaagaaccacatggtccatccacgctggaggagagtggatgacaacggaagacatgctggaggtctggaatcgtgtctggattgaggaaaatgaatggatggaggacaaaaccccagtggagaagtggagtgatgttccatactctggcaaacgagaggacatttggtgtggcagcctgattggcacaagagcccgggccacgtgggcagaaaacattcaagtggccatcaaccaagtcagatcaataattggagatgagaaatatgtggattacatgagttcattgaagagatatgaagacacaacattggttgaggatacagtattgtaaatactttgttaattgtaaataaatattgttattatgtgtagaagtttagctttataatagtgtttagtgtgtttagagttagaaaaattttagtgaggaagtcaggccggaaaattcccgccaccggaagttgagtagacggtgctgcctgcgactcaaccccaggaggactgggtgaacaaagctgcgaagtgatccatgtaagccctcagaaccgtctcggaaagaggaccccacatgttgtagcttcaaggcccaatgtcagaccacgccatggcgtgccactctgcggagagtgcagtctgcgacagtgccccaggaggactgggtgaacaaaggcgaatcaacgtcccacgcggccctagctctggcaatggtgttaaccagagtgaaaggactagaggttagaggagaccccgcgttctgaagtgcacggcccagcctggctgaagctgtaggtcaggggaaggactagaggttagtggagaccccgtgccgcaaaacaccacaacaacacagcatattgacacctgggatagactaggagatcttctgctctgcacaaccagccacacggcacagtgcgccgacaatggtggctggtggtgcgagaacacaggatct

SEQ ID NO: 22 - protein, 3422 aa, Artificial Sequence
  synthetic
MSKKPGGPGKSRAVNMLKRGMPRVLSLTGLKRAMLSLIDGRGPTRFVLALLAFFRFTAIAPTRAVLDRWRSVNKQTAMKHLLSFKKELGTLTSAINRRSSKQKKRGGKTGIAFMIGLIAGVGALTLRKIDNTIVLNVTQNDIGKTFPVRGGNCSININDAGYWCHNTVEYDCVTIAGTEEPDDIDCWCVGIEGVRVTYGKCSKSSPHGRRSRRAAVIPAHGGQGLSTHKETWLSTVAGERQIQRIERWIIRNPLYAAAMVTVAYFLGSDTKQKVLLAVLMLAIGPAYGSHCIGIERRDFVHGVQGSTWVNLVLDQGSCVTMVTENKPSVDVWLKEISLSQPTLVRRYSHTAKVHKTEIKAACPTMGEAKLDTEHNPSYECKRTYSDRGWGNGCGLFGKGSIIACAEFSSTGHMDVYEIDMTKIEYIVNSQIHGTVLVENNSQHAVESKFQPTTGGAEVTHAGYGTLGLDCHVQTMMDLNNFYLAVMGSDAWLVHKQWVEDLTLPWMAGETGHWKEKKYLVEFGEPHATKMEALVLGSQEGALRTALAGAMVVVYSQNDKKFTLKGGHVSCRARLTDLTLKGTSYPMCKGSLKFTKTPVDTGHGTAVMHVQVTKGAPCRIGVQMADNSNGGKSLGSMITSNPIVSTDGEETLVEVSPPYGESYIIVGSGDGKLVYHWHKTGSTIGSLFSETMKGAKRLAILGDDAWDFSSTGGVLASVGKMLHTVFGQAFHAIFGGLSWISKIILGCVMLWIGVNSRNGTLSVTLLTVGGILLFMTLGVNADTGCAIDISRQELRCGSGVFIHNDVEAWMDRYKYYPETPQGLAKIIQKAHKEGVCGLRSVSRLEHQMWEAVKDELNTLLKENGVDLSIVVEKQEGMYKSAPRRLTATTEKLEIGWKAWGKSILFAPELANNTFVIDGPETKECPTQNRAWNSLEVEDFGFGLTSTRMFLRVRESNTTECDSKIIGTAVKNNLAIHSDLSYWIESRFNDTWKLERAVLGEVKSCTWPETHTLWGDGVLESDLIIPITLAGLRSNHNRRPGYKTQSQGPWDEGRVEIDFDYCPGTTVTLSESCGHRGPATRTTTESGKLITDWCCRSCTLPPLRYQTDNGCWYGMEIRPQRHDEKTLVQSQVNAYNADMIDPFQLGLLVVFLATQEVLRKRWTAKISMPAILIALLVLVFGGITYTDVLRYVILVGAAFAESNSGGDVVHLALMATFKIQPVFMVASFLKARWTNQENILLMLAAAFFQMAYYDARQILLWEMPDVLNSLAVAWMILRAITFTTTSNVVVPLLALLTPGLRCLNLDVYRILLLMVGIGSLIREKRSAAAKKKGASLLCLALASTGFFNPMILAAGLVACDPNRKRGWPATEVMTAVGLMFAIVGGLAELDIDSMAIPMTIAGLMFAAFVISGKSTDMWIERTADISWEGDAEITGSSERVDVRLDDDGNFQLMNDPGAPWKIWMLRMACLAISAYTPWAILPSVVGFWITLQYTKRGGVLWDTPSPKEYKRGDTTTGVYRIMTRGLLGSYQAGAGVMVEGVFHTLWHTTKGAALMSGEGRLDPYWGSVKEDRLCYGGPWKLQHKWNGQDEVQMIVVEPGKNVKNVQTKPGVFKTPEGEIGAVTLDFPTGTSGSPIVDKNGDVIGLYGNGVIMPNGSYISAIVQGERMDEPVPAGFEPEMLRKKQITVLDLHPGAGKTRRILPQIIKEAINRRLRTAVLAPTRVVAAEMAEALRGLPIRYQTSAVAREHNGNEIVDVMCHATLTHRLMSPHRVPNYNLFVMDEAHFTDPASIAARGYISTRVELGEAAAIFMTATPPGTSDPFPESNAPISDLQTEIPDRAWNSGYEWITEYIGKTVWFVPSVKMGNEIALCLQRAGKKVIQLNRKSYETEYPKCKNDDWDFVVTTDISEMGANFKASRVIDSRKSVKPTIITEGEGRVILGEPSAVTAASAAQRRGRIGRNPSQVGDEYCYGGHTNEDDSNCAHWTEARIMLDNINMPNGLIAQFYQPEREKVYTMDGEYRLRGEERKNFLELLRTADLPVWLAYKVAAAGVSYHDRRWCFDGPRTNTILEDNNEVEVITKLGERKILRPRWIDARVYSDHQALKSFKDFASGKRSQIGFIEVLGKMPEHFMGKTWEALDTMYVVATAEKGGRAHRMALEELPDALQTIALIALLSVMTMGVFFLLMQRKGIGKIGLGGVVLGAATFFCWMAEVPGTKIAGMLLLSLLLMIVLIPEPEKQRSQTDNQLAVFLICVLTLVGAVAANEMGWLDKTKSDISGLFGQRIETKENFSIGEFLLDLRPATAWSLYAVTTAVLTPLLKHLITSDYINTSLTSINVQASALFTLARGFPFVDVGVSALLLAAGCWGQVTLTVTVTSATLLFCHYAYMVPGWQAEAMRSAQRRTAAGIMKNAVVDGIVATDVPELERTTPIMQKKVGQVMLILVSLAALVVNPSVKTVREAGILITAAAVTLWENGASSVWNATTAIGLCHIMRGGWLSCLSITWTLVKNMEKPGLKRGGAKGRTLGEVWKERLNQMTKEEFIRYRKEAITEVDRSAAKHARKERNITGGHPVSRGTAKLRWLVERRFLEPVGKVIDLGCGRGGWCYYMATQKRVQEVRGYTKGGPGHEEPQLVQSYGWNIVTMKSGVDVFYRPSECCDTLLCDIGESSSSAEVEEHRTLRVLEMVEDWLHRGPKEFCVKVLCPYMPKVIEKMELLQRRYGGGLVRNPLSRNSTHEMYWVSRASGNVVHSVNMTSQVLLGRMEKKTWKGPQYEEDVNLGSGTRAVGKPLLNSDTSKIKNRIERLRREYSSTWHHDENHPYRTWNYHGSYEVKPTGSASSLVNGVVRLLSKPWDTITNVTTMAMTDTTPFGQQRVFKEKVDTKAPEPPEGVKYVLNETTNWLWAFLAREKRPRMCSREEFIRKVNSNAALGAMFEEQNQWRSAREAVEDPKFWEMVDEEREAHLRGECHTCIYNMMGKREKKPGEFGKAKGSRAIWFMWLGARFLEFEALGFLNEDHWLGRKNSGGGVEGLGLQKLGYILREVGTRPGGRIYADDTAGWDTRITRADLENEAKVLELLDGEHRRLARAIIELTYRHKVVKVMRPAADGRTVMDVISREDQRGSGQVVTYALNTFTNLAVQLVRMMEGEGVIGPDDVEKLTKGKGPKVRTWLSENGEERLSRMAVSGDDCVVKPLDDRFATSLHFLNAMSKVRKDIQEWKPSTGWYDWQQVPFCSNHFTELIMKDGRTLVTPCRGQDELVGRARISPGAGWNVRDTACLAKSYAQMWLLLYFHRRDLRLMANAICSAVPVNWVPTGRTTWSIHAGGEWMTTEDMLEVWNRVWIEENEWMEDKTPVEKWSDVPYSGKREDIWCGSLIGTRARATWAENIQVAINQVRSIIGDEKYVDYMSSLKRYEDTTLVEDTVL

SEQ ID NO: 23 - DNA, 11947 bp, Artificial Sequence
  synthetic
gggtcggcatggcatctccacctcctcgcggtccgacctgggcatccgaaggaggacgtcgtccactcggatggctaagggagagccacttttctctcgattctctatcggaatctagggagctcggatccagacatgataagatacattgatgagtttggacaaaccacaactagaatgcagtgaaaaaaatgctttatttgtgaaatttgtgatgctattgctttatttgtaaccattataagctgcaataaacaagttaacaacaacaattgctcgagggggggcccggtaccttgaagctgtccctgatggtcgtcatctacctgcctggacagcatggcctgcaacgcgggcatcccgatgccgccggaagcgagaagaatcataatggggaaggccatccagcctcgcgtcggcgcttaaggatcatgatgataaacaatgtatggtgctaatgttgcttcaacaacaattctgttgaactgtgttttcatgtttgccaacaagcacctttatactcggtggcctccccaccaccaacttttttgcactgcaaaaaaacacgcttttgcacgcgggcccatacatagtacaaactctacgtttcgtagactattttacataaatagtctacaccgttgtatacgctccaaatacactaccacacattgaacctttttgcagtgcaaaaaagtacgtgtcggcagtcacgtaggccggccttatcgggtcgcgtcctgtcacgtacgaatcacattatcggaccggacgagtgttgtcttatcgtgacaggacgccagcttcctgtgttgctaaccgcagccggacgcaactccttatcggaacaggacgcgcctccatatcagccgcgcgttatctcatgcgcgtgaccggacacgaggcgcccgtcccgcttatcgcgcctataaatacagcccgcaacgatctggtaaacagtagttcgcctgtgtgagctgacaaacttagtagtgtttgtgaggattttgaacaattaacacagtgcgagctgtttcttagcacgaagatctcgatgtctaagaaaccaggagggcccggcaaaagccgggctgtcaatatgctaaaacgcggaatgccccgcgtgttgtccttgactggactgaagagggcaatgttgagcctgattgacggtagggggcccacacggtttgtgttggctctcttggcgttttttaggttcacggcaattgctccgacccgggcagtgctggatcgatggagaagtgtgaacaaacaaacagcgatgaaacatctcctgagtttcaagaaggaactaggaaccttgaccagtgctatcaaccggcggagctcaaaacagaagaagagaggaggaaagaccggaattgcattcatgattggcttgattgctggcgtgggagcattaactctcaggaagattgacaacactattgttctgaatgtcacccaaaatgacatagggaaaacatttcctgtaaggggcggtaattgttccattaacatcaatgatgctggatactggtgtcacaatacagtcgaatatgattgtgtcaccatagctggtacggaagagcctgacgacattgattgctggtgtgttggcattgaaggagtgagagtgacttacgggaaatgttcaaagtcatcaccgcacgggaggagatctcgtagagcagcagtcattcccgcgcatggtgggcagggactatcaacccataaagagacatggctatccactgtagcaggggaaaggcaaatccaacgtatagaaagatggatcattcgcaatcctctttatgccgctgcaatggtgactgtggcgtattttctgggaagtgacaccaaacagaaagtgctgttagctgtgttaatgttggcaattggacctgcttacggctctcactgcattggaattgaacggcgtgactttgttcatggagttcagggaagcacatgggtaaatctagtgctggaccagggatcttgcgtgaccatggtgactgaaaacaagccaagtgtggatgtgtggctcaaggaaatctctttgagtcaacccaccttggttaggagatatagccacacagcaaaggtccataaaacagaaatcaaagctgcttgtcccacaatgggagaggccaaacttgatactgaacacaatccgtcgtatgaatgcaagcgcacttattcggatagaggttggggaaacggttgtggtctgttcggaaagggtagcatcattgcatgcgccgagttttcctcaacgggccatatggatgtttatgaaattgacatgaccaagattgagtacatcgtgaactcgcagattcatggaactgtgctcgttgagaacaattcccagcatgcagtagagtcaaagttccagccaacaacaggaggagctgaagtcacacatgcagggtatggcacacttggcttggactgtcatgtacaaaccatgatggatctgaacaacttctatctggctgtcatgggatccgatgcatggctagtgcacaagcaatgggtggaagatttgacattaccctggatggcaggtgaaactggacactggaaagaaaagaaatatctagttgaatttggtgaaccacatgccacgaagatggaagcccttgttttaggttcccaggagggggctttgaggactgcccttgctggagctatggtcgtggtgtactcccaaaatgacaaaaaattcactctgaaggggggtcatgtgagttgtagagcaagattgactgacctgacattgaaaggaacatcatatccaatgtgcaagggctccctcaagttcacaaagactccagttgacaccggacatggaacagcagtgatgcatgtgcaagtgacgaaaggggcaccatgcagaataggagtccaaatggctgacaactcaaatggaggaaagtcgttgggaagcatgattacatcaaacccaatagtctccactgatggtgaggagactctggttgaagtttctcccccatatggagaaagttacatcatagtgggatcaggcgatggcaagttggtttaccattggcacaagactggaagcactattgggagcctgttctcagaaaccatgaaaggagctaagagattggcaatcctaggtgatgacgcatgggacttctcctcaacgggaggggtcttagcctcagttgggaaaatgctgcatactgtgtttggacaagctttccatgcaatctttggagggttgagttggatttcaaaaataattctaggttgtgttatgttgtggataggtgtgaactcccgcaatggcacattgagtgtcaccttgttgactgttggcggcattctgttgttcatgacacttggagttaacgctgatactggatgtgccatagatataagtcggcaagagttgaggtgtggcagcggagtatttatacacaatgatgtggaagcttggatggaccgatacaagtactaccctgaaacaccacaaggtctagctaagatcattcaaaaggctcacaaggaaggagtgtgcggtctacgatcagtttctagattggaacaccaaatgtgggaagcagtgaaggatgaactaaacactcttttgaaggaaaatggtgtggaccttagtattgtggttgagaaacaggaggggatgtacaaatcagcacctagacgcctgactgccaccactgagaaactggaaataggctggaaagcctgggggaagagcattctgttcgcaccagaactggccaacaacacttttgtgattgatggtccggagaccaaggagtgtccaacccagaaccgtgcctggaacagcttggaggtggaagattttggattcggcctcaccagcactcggatgttcttgagggtcagagaaagcaacacgactgaatgtgactcaaagatcatcgggacagccgtcaagaataacttggcgatccatagcgatctatcctactggattgaaagcaggtttaatgacacgtggaagctcgaaagggcggtcctaggtgaagtcaaatcatgcacgtggccggaaacacataccctgtggggtgacggggtccttgagagtgacctaataataccaatcacgctagcgggactgcgaagcaaccacaaccggaggcctgggtataaaacacaaagccagggtccatgggatgaaggtcgagtggagattgactttgattactgtccagggacaacggtcactctgagtgagagctgcgggcatcgtggacctgccacccgcaccactacagagagtggaaagctgataacggactggtgctgtaggagctgcaccttacctccattgcgctaccagacagacaatggttgttggtatggcatggagattaggccacagagacatgatgaaaaaactcttgtgcagtcacaggtgaatgcctacaacgctgacatgattgatccttttcagctgggccttctggtcgtgttcttggccacccaggaggtccttcgcaagaggtggacagccaagatcagcatgccagccatactgattgccctgctagttctagtgtttgggggcatcacttacactgatgtgttacgctatgtcattctggtgggggcggcctttgcagaatccaactcaggaggagatgtggtgcatctggcgctcatggcaaccttcaagatacaaccagtgttcatggtagcatcatttctcaaggcgagatggaccaaccaagaaaacattctgctgatgttggcagctgctttcttccaaatggcttactatgatgcccggcaaattttgctttgggaaatgcctgatgtattgaattcattggcagtggcttggatgatattgagagcgataacgttcaccacaacatctaatgtggtcgtcccgctgctggccttgttaacacctggattgagatgcctaaacctggatgtgtacaggatcctgctactgatggttggaataggcagtttgatcagggaaaaaagaagtgcagctgcaaaaaagaaaggagccagtctgctatgtttggctctagcctcaacaggattttttaaccccatgatccttgctgctggacttgtcgcatgtgatcccaatcgcaagcgggggtggcctgcaactgaagtgatgacagctgtcggcttaatgtttgccatcgttggagggcttgcagaactggacatagactccatggccattccaatgactatcgcagggctcatgtttgctgcttttgtgatctctggaaaatcgaccgacatgtggattgagaggacagcggacatctcctgggagggtgatgcggaaatcacaggttccagtgaaagagttgatgttcggcttgacgatgacgggaacttccagctcatgaatgatccaggagcaccttggaaaatatggatgctccgtatggcttgcctggcaatcagcgcgtacaccccttgggctattttgccttcagtagttggattttggataactctccaatacacaaagagaggaggtgtgctgtgggacactccctctccaaaggagtacaagagaggggacacgaccactggtgtctataggatcatgactcgtggattacttggtagttaccaagcaggagcaggcgtgatggttgaaggtgttttccacaccctctggcacacgacaaaaggagccgctctgatgagcggagaaggccgcctggatccatattggggcagcgtcaaggaggatcgactttgttatggtggaccctggaaactgcagcacaagtggaatgggcaagatgaggtgcaaatgattgtggtggaaccagggaagaatgtcaagaacgtccagactaagccgggggtgttcaaaacacctgaaggggagatcggggccgtgactctggatttccccactggaacatcaggctcgcccatagtggacaaaaacggtgatgtgattgggctttatggcaacggagtcataatgcccaatggctcatacataagcgcgatagtgcaaggtgaaaggatggatgagccggttcccgccggattcgaacctgagatgttgaggaaaaaacagatcaccgttttggatcttcaccctggtgctggtaaaacaaggaggattctgccacagatcatcaaagaggctataaacaggaggctgaggacggctgtgctggcgccaactagggttgtggccgctgagatggctgaagccctaagaggattgcctatccgataccaaacatctgcggtggccagagagcacaatggaaatgagatcgtcgacgtcatgtgccatgcaaccctcacccataggctgatgtctcctcatagggtgcctaattacaacctatttgtgatggacgaggcccacttcaccgacccagccagcatcgcggctagaggatacatttccacgagagttgagctgggggaggcagctgcaatattcatgactgccaccccaccaggtacctcagacccatttccagagtccaatgcaccaatatccgacttacagaccgaaatcccggaccgagcctggaactcagggtatgagtggattacagaatatatcgggaagacggtttggtttgtgcctagtgtgaagatgggaaatgagatagccctctgtctgcagcgcgctggcaaaaaagtcatccagctaaacagaaagtcgtacgagacagagtatccaaaatgcaagaacgatgattgggactttgtcgtcacaacagatatatctgagatgggagcaaactttaaggcaagcagggtgattgacagccggaagagtgtgaaaccgactatcatcacggaaggagagggaagagtgatcttgggggaaccatccgctgtgacggcagccagtgcagcccagagacgaggacgcattggtaggaatccatcacaagttggagatgagtactgctatggagggcacacgaatgaggatgactcgaactgtgctcactggactgaggcacgaatcatgctcgataacatcaacatgccaaacggattgattgctcaattctaccaaccagagcgcgagaaggtatacaccatggacggggaataccgacttagaggagaggagaggaaaaacttcctggaattgttgagaactgcagacttgccagtatggctagcttataaggtggcagcagctggggtgtcatatcatgaccggaggtggtgttttgatggccctaggacaaatacaatccttgaagacaacaatgaagtggaagtcatcacaaagcttggtgaaaggaagattctgaggccacgctggattgatgcaagggtgtactcagaccatcaggcgctgaaatcattcaaggacttcgcctcagggaagcgctctcaaataggttttatcgaggtccttggaaagatgcctgaacatttcatggggaagacatgggaagcactcgacaccatgtatgttgtagccactgcagagaaaggaggaagagctcacagaatggctttggaggagctaccagacgccctccaaacaatagctctgatcgctctgttgagtgtgatgaccatgggagtgttttttcttctcatgcagaggaagggcatcggaaagataggcctgggaggcgttgtcctgggagccgcaacctttttctgttggatggctgaagtaccaggaacgaagattgccggaatgctgctgctttccctccttctgatgatcgtgttgattcctgagccagagaagcaacgctcgcagacagacaaccagctagctgtgttcctgatttgcgtgttgacccttgtgggtgcggtggcagccaatgagatgggttggctggacaagaccaagagtgacataagcggtctgtttgggcaaagaattgaaaccaaggagaattttagcattggggagttccttttggacctgaggccggcaacggcttggtcactgtatgctgtgactacagcagttctcactcccttgctaaagcacttgatcacgtcagactacatcaacacctcattgacctcaataaatgttcaagctagtgcgctattcacgctcgcgcgaggcttcccttttgtcgatgttggagtatcggctctcctgctagcagccggatgctggggacaagtcactctcaccgtgacggtgacatcagcaacacttctgttctgccattatgcctacatggtacctggatggcaggctgaggcaatgcgctcagcccagcgacgaacagccgctggaatcatgaaaaacgctgtggtagacggcatcgtggccacggacgttccagagctagagcgtaccacacccatcatgcagaagaaggttggacaagttatgctgattttggtgtctcttgccgcattggtggtaaacccgtctgtgaagacagtgcgggaagccggaattctgattacggcagcagctgttaccctctgggagaacggagcaagctctgtgtggaacgcaacaaccgccataggactttgtcacatcatgcgcggaggctggttatcgtgtttatccataacatggactcttgtaaaaaacatggaaaaaccagggctgaagagaggtggggcaaaaggacgcaccttgggggaggtttggaaagaaagacttaaccagatgacgaaagaagaattcatcaggtaccgtaaagaagccatcactgaagttgaccgctcagcagcaaaacacgctaggaaggaaaggaatatcactggagggcatccagtttctagaggcacggcaaagctaagatggctggtcgagaggaggtttcttgaaccggtcggaaaagtgatcgaccttggatgtggaagaggcggctggtgttattacatggccacacaaaaaagagtccaagaagtcagagggtacacaaaaggtggtcccggacatgaagagccccagctagtgcagagctatggatggaacattgtcaccatgaagagtggggtggatgtgttctataggccttctgaatgttgtgacactctcctttgtgatatcggagagtcctcatcaagtgctgaagttgaagaacatagaacgctacgagtccttgaaatggtggaagactggttgcatcgagggccaaaggaattttgtgtgaaggtactgtgcccctacatgccaaaggtcatagaaaagatggagctgctccaacgccggtatggcgggggattggttaggaacccactctcacggaattccacacatgaaatgtattgggtgagtcgagcctcaggcaatgtggtgcactcagtgaacatgaccagccaggtactcttaggaaggatggagaagaagacctggaagggacctcagtacgaagaagacgtgaacttgggaagcggaacgagagcagtgggaaaacctctactcaactcagacaccagcaagataaagaacaggattgaacgacttaggcgtgagtacagctcgacatggcatcatgatgagaaccacccatatagaacctggaactaccacggtagctacgaagtgaagccaacaggctctgcaagctcactggtcaatggagtggtcaggctcctctcgaaaccatgggacaccatcacaaatgtcaccacaatggccatgacggacaccaccccttttggacaacagcgagtgttcaaagagaaggtggacacgaaagctccggaaccgccagaaggagtgaagtatgtgctcaatgaaaccaccaactggttgtgggcgttcctggcacgagaaaagcgtcccagaatgtgctcgcgagaggaatttataaggaaggtcaatagtaatgcagctctgggcgccatgtttgaggagcagaatcaatggaggagtgctagagaagcggttgaagatccaaaattctgggaaatggtggatgaagagcgtgaggcgcacttacgcggagaatgtcatacttgcatttacaacatgatgggaaagagggagaaaaaacccggagagtttgggaaagccaagggaagcagggccatctggtttatgtggctgggagctcgcttcctagagtttgaggctctgggctttcttaatgaggaccactggcttggaagaaagaactcggggggcggggtcgagggtctgggcctccagaaattaggctacatcctgcgtgaagttggcacccgacccggaggcagaatctacgctgatgacacagccggttgggacacccgcatcacaagagctgacctggagaatgaagccaaggttcttgagttgttggacggggagcaccggcgcctggccagggccatcattgagctcacctatcgccacaaagtagtgaaggtaatgcgcccggctgctgatggaagaaccgtcatggacgtcatctccagggaagaccagagaggaagtgggcaagttgtcacctacgctctaaacacctttaccaacctggctgtccaattggtgagaatgatggaaggagagggtgtgatcggcccagatgatgtggagaaactcacaaaggggaaagggcccaaggttagaacctggctgtctgagaatggggaggaaagactcagccgcatggctgtcagtggagatgactgtgtggtaaagcccttggatgatcgctttgccacctctctccactttctcaacgccatgtcaaaggtgcgcaaggacatccaagagtggaaaccatcaaccggatggtatgattggcagcaagttccattctgttcaaaccacttcactgaactgatcatgaaagatggaagaacactggtgactccatgccgagggcaggatgagttagtgggcagagctcgcatctccccaggggctggatggaatgttcgagacactgcttgcttagccaaatcttatgctcagatgtggttgctcctgtacttccacagaagagatctgcggttgatggccaacgccatctgctctgccgtacctgtaaactgggtccctactggaagaaccacatggtccatccacgctggaggagagtggatgacaacggaagacatgctggaggtctggaatcgtgtctggattgaggaaaatgaatggatggaggacaaaaccccagtggagaagtggagtgatgttccatactctggcaaacgagaggacatttggtgtggcagcctgattggcacaagagcccgggccacgtgggcagaaaacattcaagtggccatcaaccaagtcagatcaataattggagatgagaaatatgtggattacatgagttcattgaagagatatgaagacacaacattggttgaggatacagtattgtaaatactttgttaattgtaaataaatattgttattatgtgtagaagtttagctttataatagtgtttagtgtgtttagagttagaaaaattttagtgaggaagtcaggccggaaaattcccgccaccggaagttgagtagacggtgctgcctgcgactcaaccccaggaggactgggtgaacaaagctgcgaagtgatccatgtaagccctcagaaccgtctcggaaagaggaccccacatgttgtagcttcaaggcccaatgtcagaccacgccatggcgtgccactctgcggagagtgcagtctgcgacagtgccccaggaggactgggtgaacaaaggcgaatcaacgtcccacgcggccctagctctggcaatggtgttaaccagagtgaaaggactagaggttagaggagaccccgcgttctgaagtgcacggcccagcctggctgaagctgtaggtcaggggaaggactagaggttagtggagaccccgtgccgcaaaacaccacaacaacacagcatattgacacctgggatagactaggagatcttctgctctgcacaaccagccacacggcacagtgcgccgacaatggtggctggtggtgcgagaacacaggatct

SEQ ID NO: 24 - protein, 3336 aa, Artificial Sequence
  synthetic
MSKKPGGPGKSRAVNMLKRGMPRVLSLTGLKRAMLSLIDGRGPTRFVLALLAFFRFTAIAPTRAVLDRWRSVNKQTAMKHLLSFKKELGTLTSAINRRSSKQKKRGGKTGIAFMIGLIAGVGAAITIAPHGEAGLRVGSTKHWTSRATPQRYLMRVEKWVLRHPLPALVLVVLGWMMGRSHGQRAMYIVLMLLVAPSYGNQCLDVQSRDFVQGVSGGTWVDVVLDHDNCITIVADGKPSFDIRLSKMSMSKFAEYKRYCLQATMSDVTSIVACPGAGDAHNDKSKNHEYICKAVNNDRGWGNGCVLFGKGSMETCGKFECKKKMAGKLVARENVESVVTVHVHGASATDTKGVDTASTAKATITPKASVATLNLNDFGSLEVDCSTDVGMDFGEIVVADMSGKWWIVNKDWFNELALPWSTASTTAEVWQARDRLVEFGWPHAAKQNIYDIGDQEGAVTAAIAQAPMAKWESDKVELISGILKCKVKLGNLKLRGVTYSMCAQTFTTETRPADTGHGTVAFKVKYVGTDVPCRVPLHIIDSDGGVAAGRVITAHPFVMKQNDYIILEVEPPFGDSKIEIGTGTTKLVEAWHRKGSSIGNAFTATYKGITKLTVLGEHAWDFNSLGGFGASLGKAVHTLFGGVFRVMFGGMGWLTKIFVGAVLVWLGLGAHDKTIATTMILVGSILMYMAVTVGADTGCAIDISRQELRCGSGVFIHNDVEAWMDRYKYYPETPQGLAKIIQKAHKEGVCGLRSVSRLEHQMWEAVKDELNTLLKENGVDLSIVVEKQEGMYKSAPRRLTATTEKLEIGWKAWGKSILFAPELANNTFVIDGPETKECPTQNRAWNSLEVEDFGFGLTSTRMFLRVRESNTTECDSKIIGTAVKNNLAIHSDLSYWIESRFNDTWKLERAVLGEVKSCTWPETHTLWGDGVLESDLIIPITLAGLRSNHNRRPGYKTQSQGPWDEGRVEIDFDYCPGTTVTLSESCGHRGPATRTTTESGKLITDWCCRSCTLPPLRYQTDNGCWYGMEIRPQRHDEKTLVQSQVNAYNADMIDPFQLGLLVVFLATQEVLRKRWTAKISMPAILIALLVLVFGGITYTDVLRYVILVGAAFAESNSGGDVVHLALMATFKIQPVFMVASFLKARWTNQENILLMLAAAFFQMAYYDARQILLWEMPDVLNSLAVAWMILRAITFTTTSNVVVPLLALLTPGLRCLNLDVYRILLLMVGIGSLIREKRSAAAKKKGASLLCLALASTGFFNPMILAAGLVACDPNRKRGWPATEVMTAVGLMFAIVGGLAELDIDSMAIPMTIAGLMFAAFVISGKSTDMWIERTADISWEGDAEITGSSERVDVRLDDDGNFQLMNDPGAPWKIWMLRMACLAISAYTPWAILPSVVGFWITLQYTKRGGVLWDTPSPKEYKRGDTTTGVYRIMTRGLLGSYQAGAGVMVEGVFHTLWHTTKGAALMSGEGRLDPYWGSVKEDRLCYGGPWKLQHKWNGQDEVQMIVVEPGKNVKNVQTKPGVFKTPEGEIGAVTLDFPTGTSGSPIVDKNGDVIGLYGNGVIMPNGSYISAIVQGERMDEPVPAGFEPEMLRKKQITVLDLHPGAGKTRRILPQIIKEAINRRLRTAVLAPTRVVAAEMAEALRGLPIRYQTSAVAREHNGNEIVDVMCHATLTHRLMSPHRVPNYNLFVMDEAHFTDPASIAARGYISTRVELGEAAAIFMTATPPGTSDPFPESNAPISDLQTEIPDRAWNSGYEWITEYIGKTVWFVPSVKMGNEIALCLQRAGKKVIQLNRKSYETEYPKCKNDDWDFVVTTDISEMGANFKASRVIDSRKSVKPTIITEGEGRVILGEPSAVTAASAAQRRGRIGRNPSQVGDEYCYGGHTNEDDSNCAHWTEARIMLDNINMPNGLIAQFYQPEREKVYTMDGEYRLRGEERKNFLELLRTADLPVWLAYKVAAAGVSYHDRRWCFDGPRTNTILEDNNEVEVITKLGERKILRPRWIDARVYSDHQALKSFKDFASGKRSQIGFIEVLGKMPEHFMGKTWEALDTMYVVATAEKGGRAHRMALEELPDALQTIALIALLSVMTMGVFFLLMQRKGIGKIGLGGVVLGAATFFCWMAEVPGTKIAGMLLLSLLLMIVLIPEPEKQRSQTDNQLAVFLICVLTLVGAVAANEMGWLDKTKSDISGLFGQRIETKENFSIGEFLLDLRPATAWSLYAVTTAVLTPLLKHLITSDYINTSLTSINVQASALFTLARGFPFVDVGVSALLLAAGCWGQVTLTVTVTSATLLFCHYAYMVPGWQAEAMRSAQRRTAAGIMKNAVVDGIVATDVPELERTTPIMQKKVGQVMLILVSLAALVVNPSVKTVREAGILITAAAVTLWENGASSVWNATTAIGLCHIMRGGWLSCLSITWTLVKNMEKPGLKRGGAKGRTLGEVWKERLNQMTKEEFIRYRKEAITEVDRSAAKHARKERNITGGHPVSRGTAKLRWLVERRFLEPVGKVIDLGCGRGGWCYYMATQKRVQEVRGYTKGGPGHEEPQLVQSYGWNIVTMKSGVDVFYRPSECCDTLLCDIGESSSSAEVEEHRTLRVLEMVEDWLHRGPKEFCVKVLCPYMPKVIEKMELLQRRYGGGLVRNPLSRNSTHEMYWVSRASGNVVHSVNMTSQVLLGRMEKKTWKGPQYEEDVNLGSGTRAVGKPLLNSDTSKIKNRIERLRREYSSTWHHDENHPYRTWNYHGSYEVKPTGSASSLVNGVVRLLSKPWDTITNVTTMAMTDTTPFGQQRVFKEKVDTKAPEPPEGVKYVLNETTNWLWAFLAREKRPRMCSREEFIRKVNSNAALGAMFEEQNQWRSAREAVEDPKFWEMVDEEREAHLRGECHTCIYNMMGKREKKPGEFGKAKGSRAIWFMWLGARFLEFEALGFLNEDHWLGRKNSGGGVEGLGLQKLGYILREVGTRPGGRIYADDTAGWDTRITRADLENEAKVLELLDGEHRRLARAIIELTYRHKVVKVMRPAADGRTVMDVISREDQRGSGQVVTYALNTFTNLAVQLVRMMEGEGVIGPDDVEKLTKGKGPKVRTWLSENGEERLSRMAVSGDDCVVKPLDDRFATSLHFLNAMSKVRKDIQEWKPSTGWYDWQQVPFCSNHFTELIMKDGRTLVTPCRGQDELVGRARISPGAGWNVRDTACLAKSYAQMWLLLYFHRRDLRLMANAICSAVPVNWVPTGRTTWSIHAGGEWMTTEDMLEVWNRVWIEENEWMEDKTPVEKWSDVPYSGKREDIWCGSLIGTRARATWAENIQVAINQVRSIIGDEKYVDYMSSLKRYEDTTLVEDTVL

SEQ ID NO: 25 - DNA, 11689 bp, Artificial Sequence
  synthetic
gggtcggcatggcatctccacctcctcgcggtccgacctgggcatccgaaggaggacgtcgtccactcggatggctaagggagagccacttttctctcgattctctatcggaatctagggagctcggatccagacatgataagatacattgatgagtttggacaaaccacaactagaatgcagtgaaaaaaatgctttatttgtgaaatttgtgatgctattgctttatttgtaaccattataagctgcaataaacaagttaacaacaacaattgctcgagggggggcccggtaccttgaagctgtccctgatggtcgtcatctacctgcctggacagcatggcctgcaacgcgggcatcccgatgccgccggaagcgagaagaatcataatggggaaggccatccagcctcgcgtcggcgcttaaggatcatgatgataaacaatgtatggtgctaatgttgcttcaacaacaattctgttgaactgtgttttcatgtttgccaacaagcacctttatactcggtggcctccccaccaccaacttttttgcactgcaaaaaaacacgcttttgcacgcgggcccatacatagtacaaactctacgtttcgtagactattttacataaatagtctacaccgttgtatacgctccaaatacactaccacacattgaacctttttgcagtgcaaaaaagtacgtgtcggcagtcacgtaggccggccttatcgggtcgcgtcctgtcacgtacgaatcacattatcggaccggacgagtgttgtcttatcgtgacaggacgccagcttcctgtgttgctaaccgcagccggacgcaactccttatcggaacaggacgcgcctccatatcagccgcgcgttatctcatgcgcgtgaccggacacgaggcgcccgtcccgcttatcgcgcctataaatacagcccgcaacgatctggtaaacagtagttcgcctgtgtgagctgacaaacttagtagtgtttgtgaggattttgaacaattaacacagtgcgagctgtttcttagcacgaagatctcgatgtctaagaaaccaggagggcccggcaaaagccgggctgtcaatatgctaaaacgcggaatgccccgcgtgttgtccttgactggactgaagagggcaatgttgagcctgattgacggtagggggcccacacggtttgtgttggctctcttggcgttttttaggttcacggcaattgctccgacccgggcagtgctggatcgatggagaagtgtgaacaaacaaacagcgatgaaacatctcctgagtttcaagaaggaactaggaaccttgaccagtgctatcaaccggcggagctcaaaacagaagaagagaggaggaaagaccggaattgcattcatgattggcttgattgctggcgtgggagcagcaatcacgatagccccgcacggcgaagcaggattgcgtgttggaagcaccaagcattggacttctagagcaactccacaacggtatctaatgcgcgttgagaaatgggtgctgcggcatcctctacctgctctcgtgttggtggtactgggatggatgatgggtcgttctcacggccagagggccatgtatatagtgctgatgctgcttgtggctccgtcatatggtaaccaatgcctggatgtgcagtcacgtgatttcgtgcaaggggttagtggtggcacctgggtagatgttgttttggatcatgacaattgcataaccattgttgctgacgggaaaccatcttttgatattcgtttgtcgaaaatgagcatgtctaaattcgcagagtacaaacggtattgcctccaggccacgatgagtgatgtcactagcatagtggcgtgtccaggggctggggatgctcataatgacaagagcaaaaaccacgagtacatttgcaaagctgttaacaatgaccgcggatggggcaatgggtgtgtcctttttggcaaaggatcaatggaaacttgtggtaagtttgaatgtaagaagaaaatggctggcaagttagtggcacgtgagaacgtggaatcagtggtcactgtgcatgtacatggtgcctccgcaactgacacaaaaggagttgacaccgcctctacagccaaagcgactatcacgccaaaagcttctgtggctactctaaatttaaacgactttggtagcctggaggtggattgttcaactgatgttggcatggactttggagagattgtggtggccgacatgtcaggaaagtggtggatcgtgaacaaggattggttcaatgaacttgctttgccgtggtccacggctagcaccactgctgaagtttggcaggcacgagacagacttgttgagtttggatggccacatgcggccaagcagaacatctatgacattggggaccaagaaggagctgtgacggctgccatagcccaggcacccatggcgaaatgggagtctgacaaggtcgagctaatctctgggattctcaagtgcaaggtgaaacttggcaacctaaagctgcgtggggtgacctatagcatgtgtgcccagacattcaccacggaaacaaggccggccgacaccggacatggcactgtggctttcaaggtgaaatacgtcggaacagacgtgccttgccgggtcccactccacatcatagacagtgacggcggagtggccgctggacgagtgataacggcacaccccttcgtcatgaagcagaatgattacattattctggaagttgaaccacccttcggtgacagcaaaattgagattggaacaggaacaacaaaactcgttgaagcatggcatcgaaaaggtagctcgataggaaatgcctttacggccacttacaagggcatcacaaaattgacagtgcttggagaacatgcctgggattttaattcactaggtgggtttggagcaagccttgggaaggcggtccatacactgtttggaggtgtattccgggtgatgttcggaggcatgggatggttaaccaagatctttgtgggtgctgtcctagtctggctaggattaggagctcatgacaagacgatcgccaccaccatgatcctggtaggatccatactgatgtacatggcagtgaccgtgggtgccgatactggatgtgccatagatataagtcggcaagagttgaggtgtggcagcggagtatttatacacaatgatgtggaagcttggatggaccgatacaagtactaccctgaaacaccacaaggtctagctaagatcattcaaaaggctcacaaggaaggagtgtgcggtctacgatcagtttctagattggaacaccaaatgtgggaagcagtgaaggatgaactaaacactcttttgaaggaaaatggtgtggaccttagtattgtggttgagaaacaggaggggatgtacaaatcagcacctagacgcctgactgccaccactgagaaactggaaataggctggaaagcctgggggaagagcattctgttcgcaccagaactggccaacaacacttttgtgattgatggtccggagaccaaggagtgtccaacccagaaccgtgcctggaacagcttggaggtggaagattttggattcggcctcaccagcactcggatgttcttgagggtcagagaaagcaacacgactgaatgtgactcaaagatcatcgggacagccgtcaagaataacttggcgatccatagcgatctatcctactggattgaaagcaggtttaatgacacgtggaagctcgaaagggcggtcctaggtgaagtcaaatcatgcacgtggccggaaacacataccctgtggggtgacggggtccttgagagtgacctaataataccaatcacgctagcgggactgcgaagcaaccacaaccggaggcctgggtataaaacacaaagccagggtccatgggatgaaggtcgagtggagattgactttgattactgtccagggacaacggtcactctgagtgagagctgcgggcatcgtggacctgccacccgcaccactacagagagtggaaagctgataacggactggtgctgtaggagctgcaccttacctccattgcgctaccagacagacaatggttgttggtatggcatggagattaggccacagagacatgatgaaaaaactcttgtgcagtcacaggtgaatgcctacaacgctgacatgattgatccttttcagctgggccttctggtcgtgttcttggccacccaggaggtccttcgcaagaggtggacagccaagatcagcatgccagccatactgattgccctgctagttctagtgtttgggggcatcacttacactgatgtgttacgctatgtcattctggtgggggcggcctttgcagaatccaactcaggaggagatgtggtgcatctggcgctcatggcaaccttcaagatacaaccagtgttcatggtagcatcatttctcaaggcgagatggaccaaccaagaaaacattctgctgatgttggcagctgctttcttccaaatggcttactatgatgcccggcaaattttgctttgggaaatgcctgatgtattgaattcattggcagtggcttggatgatattgagagcgataacgttcaccacaacatctaatgtggtcgtcccgctgctggccttgttaacacctggattgagatgcctaaacctggatgtgtacaggatcctgctactgatggttggaataggcagtttgatcagggaaaaaagaagtgcagctgcaaaaaagaaaggagccagtctgctatgtttggctctagcctcaacaggattttttaaccccatgatccttgctgctggacttgtcgcatgtgatcccaatcgcaagcgggggtggcctgcaactgaagtgatgacagctgtcggcttaatgtttgccatcgttggagggcttgcagaactggacatagactccatggccattccaatgactatcgcagggctcatgtttgctgcttttgtgatctctggaaaatcgaccgacatgtggattgagaggacagcggacatctcctgggagggtgatgcggaaatcacaggttccagtgaaagagttgatgttcggcttgacgatgacgggaacttccagctcatgaatgatccaggagcaccttggaaaatatggatgctccgtatggcttgcctggcaatcagcgcgtacaccccttgggctattttgccttcagtagttggattttggataactctccaatacacaaagagaggaggtgtgctgtgggacactccctctccaaaggagtacaagagaggggacacgaccactggtgtctataggatcatgactcgtggattacttggtagttaccaagcaggagcaggcgtgatggttgaaggtgttttccacaccctctggcacacgacaaaaggagccgctctgatgagcggagaaggccgcctggatccatattggggcagcgtcaaggaggatcgactttgttatggtggaccctggaaactgcagcacaagtggaatgggcaagatgaggtgcaaatgattgtggtggaaccagggaagaatgtcaagaacgtccagactaagccgggggtgttcaaaacacctgaaggggagatcggggccgtgactctggatttccccactggaacatcaggctcgcccatagtggacaaaaacggtgatgtgattgggctttatggcaacggagtcataatgcccaatggctcatacataagcgcgatagtgcaaggtgaaaggatggatgagccggttcccgccggattcgaacctgagatgttgaggaaaaaacagatcaccgttttggatcttcaccctggtgctggtaaaacaaggaggattctgccacagatcatcaaagaggctataaacaggaggctgaggacggctgtgctggcgccaactagggttgtggccgctgagatggctgaagccctaagaggattgcctatccgataccaaacatctgcggtggccagagagcacaatggaaatgagatcgtcgacgtcatgtgccatgcaaccctcacccataggctgatgtctcctcatagggtgcctaattacaacctatttgtgatggacgaggcccacttcaccgacccagccagcatcgcggctagaggatacatttccacgagagttgagctgggggaggcagctgcaatattcatgactgccaccccaccaggtacctcagacccatttccagagtccaatgcaccaatatccgacttacagaccgaaatcccggaccgagcctggaactcagggtatgagtggattacagaatatatcgggaagacggtttggtttgtgcctagtgtgaagatgggaaatgagatagccctctgtctgcagcgcgctggcaaaaaagtcatccagctaaacagaaagtcgtacgagacagagtatccaaaatgcaagaacgatgattgggactttgtcgtcacaacagatatatctgagatgggagcaaactttaaggcaagcagggtgattgacagccggaagagtgtgaaaccgactatcatcacggaaggagagggaagagtgatcttgggggaaccatccgctgtgacggcagccagtgcagcccagagacgaggacgcattggtaggaatccatcacaagttggagatgagtactgctatggagggcacacgaatgaggatgactcgaactgtgctcactggactgaggcacgaatcatgctcgataacatcaacatgccaaacggattgattgctcaattctaccaaccagagcgcgagaaggtatacaccatggacggggaataccgacttagaggagaggagaggaaaaacttcctggaattgttgagaactgcagacttgccagtatggctagcttataaggtggcagcagctggggtgtcatatcatgaccggaggtggtgttttgatggccctaggacaaatacaatccttgaagacaacaatgaagtggaagtcatcacaaagcttggtgaaaggaagattctgaggccacgctggattgatgcaagggtgtactcagaccatcaggcgctgaaatcattcaaggacttcgcctcagggaagcgctctcaaataggttttatcgaggtccttggaaagatgcctgaacatttcatggggaagacatgggaagcactcgacaccatgtatgttgtagccactgcagagaaaggaggaagagctcacagaatggctttggaggagctaccagacgccctccaaacaatagctctgatcgctctgttgagtgtgatgaccatgggagtgttttttcttctcatgcagaggaagggcatcggaaagataggcctgggaggcgttgtcctgggagccgcaacctttttctgttggatggctgaagtaccaggaacgaagattgccggaatgctgctgctttccctccttctgatgatcgtgttgattcctgagccagagaagcaacgctcgcagacagacaaccagctagctgtgttcctgatttgcgtgttgacccttgtgggtgcggtggcagccaatgagatgggttggctggacaagaccaagagtgacataagcggtctgtttgggcaaagaattgaaaccaaggagaattttagcattggggagttccttttggacctgaggccggcaacggcttggtcactgtatgctgtgactacagcagttctcactcccttgctaaagcacttgatcacgtcagactacatcaacacctcattgacctcaataaatgttcaagctagtgcgctattcacgctcgcgcgaggcttcccttttgtcgatgttggagtatcggctctcctgctagcagccggatgctggggacaagtcactctcaccgtgacggtgacatcagcaacacttctgttctgccattatgcctacatggtacctggatggcaggctgaggcaatgcgctcagcccagcgacgaacagccgctggaatcatgaaaaacgctgtggtagacggcatcgtggccacggacgttccagagctagagcgtaccacacccatcatgcagaagaaggttggacaagttatgctgattttggtgtctcttgccgcattggtggtaaacccgtctgtgaagacagtgcgggaagccggaattctgattacggcagcagctgttaccctctgggagaacggagcaagctctgtgtggaacgcaacaaccgccataggactttgtcacatcatgcgcggaggctggttatcgtgtttatccataacatggactcttgtaaaaaacatggaaaaaccagggctgaagagaggtggggcaaaaggacgcaccttgggggaggtttggaaagaaagacttaaccagatgacgaaagaagaattcatcaggtaccgtaaagaagccatcactgaagttgaccgctcagcagcaaaacacgctaggaaggaaaggaatatcactggagggcatccagtttctagaggcacggcaaagctaagatggctggtcgagaggaggtttcttgaaccggtcggaaaagtgatcgaccttggatgtggaagaggcggctggtgttattacatggccacacaaaaaagagtccaagaagtcagagggtacacaaaaggtggtcccggacatgaagagccccagctagtgcagagctatggatggaacattgtcaccatgaagagtggggtggatgtgttctataggccttctgaatgttgtgacactctcctttgtgatatcggagagtcctcatcaagtgctgaagttgaagaacatagaacgctacgagtccttgaaatggtggaagactggttgcatcgagggccaaaggaattttgtgtgaaggtactgtgcccctacatgccaaaggtcatagaaaagatggagctgctccaacgccggtatggcgggggattggttaggaacccactctcacggaattccacacatgaaatgtattgggtgagtcgagcctcaggcaatgtggtgcactcagtgaacatgaccagccaggtactcttaggaaggatggagaagaagacctggaagggacctcagtacgaagaagacgtgaacttgggaagcggaacgagagcagtgggaaaacctctactcaactcagacaccagcaagataaagaacaggattgaacgacttaggcgtgagtacagctcgacatggcatcatgatgagaaccacccatatagaacctggaactaccacggtagctacgaagtgaagccaacaggctctgcaagctcactggtcaatggagtggtcaggctcctctcgaaaccatgggacaccatcacaaatgtcaccacaatggccatgacggacaccaccccttttggacaacagcgagtgttcaaagagaaggtggacacgaaagctccggaaccgccagaaggagtgaagtatgtgctcaatgaaaccaccaactggttgtgggcgttcctggcacgagaaaagcgtcccagaatgtgctcgcgagaggaatttataaggaaggtcaatagtaatgcagctctgggcgccatgtttgaggagcagaatcaatggaggagtgctagagaagcggttgaagatccaaaattctgggaaatggtggatgaagagcgtgaggcgcacttacgcggagaatgtcatacttgcatttacaacatgatgggaaagagggagaaaaaacccggagagtttgggaaagccaagggaagcagggccatctggtttatgtggctgggagctcgcttcctagagtttgaggctctgggctttcttaatgaggaccactggcttggaagaaagaactcggggggcggggtcgagggtctgggcctccagaaattaggctacatcctgcgtgaagttggcacccgacccggaggcagaatctacgctgatgacacagccggttgggacacccgcatcacaagagctgacctggagaatgaagccaaggttcttgagttgttggacggggagcaccggcgcctggccagggccatcattgagctcacctatcgccacaaagtagtgaaggtaatgcgcccggctgctgatggaagaaccgtcatggacgtcatctccagggaagaccagagaggaagtgggcaagttgtcacctacgctctaaacacctttaccaacctggctgtccaattggtgagaatgatggaaggagagggtgtgatcggcccagatgatgtggagaaactcacaaaggggaaagggcccaaggttagaacctggctgtctgagaatggggaggaaagactcagccgcatggctgtcagtggagatgactgtgtggtaaagcccttggatgatcgctttgccacctctctccactttctcaacgccatgtcaaaggtgcgcaaggacatccaagagtggaaaccatcaaccggatggtatgattggcagcaagttccattctgttcaaaccacttcactgaactgatcatgaaagatggaagaacactggtgactccatgccgagggcaggatgagttagtgggcagagctcgcatctccccaggggctggatggaatgttcgagacactgcttgcttagccaaatcttatgctcagatgtggttgctcctgtacttccacagaagagatctgcggttgatggccaacgccatctgctctgccgtacctgtaaactgggtccctactggaagaaccacatggtccatccacgctggaggagagtggatgacaacggaagacatgctggaggtctggaatcgtgtctggattgaggaaaatgaatggatggaggacaaaaccccagtggagaagtggagtgatgttccatactctggcaaacgagaggacatttggtgtggcagcctgattggcacaagagcccgggccacgtgggcagaaaacattcaagtggccatcaaccaagtcagatcaataattggagatgagaaatatgtggattacatgagttcattgaagagatatgaagacacaacattggttgaggatacagtattgtaaatactttgttaattgtaaataaatattgttattatgtgtagaagtttagctttataatagtgtttagtgtgtttagagttagaaaaattttagtgaggaagtcaggccggaaaattcccgccaccggaagttgagtagacggtgctgcctgcgactcaaccccaggaggactgggtgaacaaagctgcgaagtgatccatgtaagccctcagaaccgtctcggaaagaggaccccacatgttgtagcttcaaggcccaatgtcagaccacgccatggcgtgccactctgcggagagtgcagtctgcgacagtgccccaggaggactgggtgaacaaaggcgaatcaacgtcccacgcggccctagctctggcaatggtgttaaccagagtgaaaggactagaggttagaggagaccccgcgttctgaagtgcacggcccagcctggctgaagctgtaggtcaggggaaggactagaggttagtggagaccccgtgccgcaaaacaccacaacaacacagcatattgacacctgggatagactaggagatcttctgctctgcacaaccagccacacggcacagtgcgccgacaatggtggctggtggtgcgagaacacaggatct

SEQ ID NO: 26 - protein, 3334 aa, Artificial Sequence
  synthetic
MSKKPGGPGKSRAVNMLKRGMPRVLSLTGLKRAMLSLIDGRGPTRFVLALLAFFRFTAIAPTRAVLDRWRSVNKQTAMKHLLSFKKELGTLTSAINRRSSKQKKRGGKTGIAFMIGLIAGVGAVVIDMQVSTTRGTEIFEGETNRTDYLHLLKLPADGCWSGILVTKKCPKVTDLAKDLESTDCGSTWTEFTLRYRRCVVKKREKRSREPPKADLLAEMEIIAFKTIRENKTIFIVALLCVAIAKRWPTWVVILLAIGTWTTVKGEFVEPLYTLKAEQMTMLQTIVRPEEGYVVATPNGLLEFKTGPAEIYGGQWLRELLADCHVNASYSTDVCPGGSQLNMADIMAKERVCSTQPYNRGWGTGCFKWGIGFVGTCVELHCDRGFNVSSIARSAIVMNVTASFHSVSDTQQMVGDIPLTFRFAKLGNAAMTCRLESEQLLLDYYHVTGSSHEGLFLRSQVDSWPGVHSTASGRHGMEKVVVWGDARSNEILVKNVIEPSLSWEDAIATHGGFRDISFVCQIMLDKLVSGAFRDCPGPKISTFSQDGFGYSGVVITTLTASSNETCSLSLTCHGCLLQSTKMIFLAGKTTSRAFVKCGNHTSTLLVGSTSVSIECALNPISQGWRLARHVVDRYRRFGVSGVAGVWQDLVGKFSVGAFFSNTALLVILVLAALIDKRIAFLLVLGGYFYYVRADTGCAIDISRQELRCGSGVFIHNDVEAWMDRYKYYPETPQGLAKIIQKAHKEGVCGLRSVSRLEHQMWEAVKDELNTLLKENGVDLSIVVEKQEGMYKSAPRRLTATTEKLEIGWKAWGKSILFAPELANNTFVIDGPETKECPTQNRAWNSLEVEDFGFGLTSTRMFLRVRESNTTECDSKIIGTAVKNNLAIHSDLSYWIESRFNDTWKLERAVLGEVKSCTWPETHTLWGDGVLESDLIIPITLAGLRSNHNRRPGYKTQSQGPWDEGRVEIDFDYCPGTTVTLSESCGHRGPATRTTTESGKLITDWCCRSCTLPPLRYQTDNGCWYGMEIRPQRHDEKTLVQSQVNAYNADMIDPFQLGLLVVFLATQEVLRKRWTAKISMPAILIALLVLVFGGITYTDVLRYVILVGAAFAESNSGGDVVHLALMATFKIQPVFMVASFLKARWTNQENILLMLAAAFFQMAYYDARQILLWEMPDVLNSLAVAWMILRAITFTTTSNVVVPLLALLTPGLRCLNLDVYRILLLMVGIGSLIREKRSAAAKKKGASLLCLALASTGFFNPMILAAGLVACDPNRKRGWPATEVMTAVGLMFAIVGGLAELDIDSMAIPMTIAGLMFAAFVISGKSTDMWIERTADISWEGDAEITGSSERVDVRLDDDGNFQLMNDPGAPWKIWMLRMACLAISAYTPWAILPSVVGFWITLQYTKRGGVLWDTPSPKEYKRGDTTTGVYRIMTRGLLGSYQAGAGVMVEGVFHTLWHTTKGAALMSGEGRLDPYWGSVKEDRLCYGGPWKLQHKWNGQDEVQMIVVEPGKNVKNVQTKPGVFKTPEGEIGAVTLDFPTGTSGSPIVDKNGDVIGLYGNGVIMPNGSYISAIVQGERMDEPVPAGFEPEMLRKKQITVLDLHPGAGKTRRILPQIIKEAINRRLRTAVLAPTRVVAAEMAEALRGLPIRYQTSAVAREHNGNEIVDVMCHATLTHRLMSPHRVPNYNLFVMDEAHFTDPASIAARGYISTRVELGEAAAIFMTATPPGTSDPFPESNAPISDLQTEIPDRAWNSGYEWITEYIGKTVWFVPSVKMGNEIALCLQRAGKKVIQLNRKSYETEYPKCKNDDWDFVVTTDISEMGANFKASRVIDSRKSVKPTIITEGEGRVILGEPSAVTAASAAQRRGRIGRNPSQVGDEYCYGGHTNEDDSNCAHWTEARIMLDNINMPNGLIAQFYQPEREKVYTMDGEYRLRGEERKNFLELLRTADLPVWLAYKVAAAGVSYHDRRWCFDGPRTNTILEDNNEVEVITKLGERKILRPRWIDARVYSDHQALKSFKDFASGKRSQIGFIEVLGKMPEHFMGKTWEALDTMYVVATAEKGGRAHRMALEELPDALQTIALIALLSVMTMGVFFLLMQRKGIGKIGLGGVVLGAATFFCWMAEVPGTKIAGMLLLSLLLMIVLIPEPEKQRSQTDNQLAVFLICVLTLVGAVAANEMGWLDKTKSDISGLFGQRIETKENFSIGEFLLDLRPATAWSLYAVTTAVLTPLLKHLITSDYINTSLTSINVQASALFTLARGFPFVDVGVSALLLAAGCWGQVTLTVTVTSATLLFCHYAYMVPGWQAEAMRSAQRRTAAGIMKNAVVDGIVATDVPELERTTPIMQKKVGQVMLILVSLAALVVNPSVKTVREAGILITAAAVTLWENGASSVWNATTAIGLCHIMRGGWLSCLSITWTLVKNMEKPGLKRGGAKGRTLGEVWKERLNQMTKEEFIRYRKEAITEVDRSAAKHARKERNITGGHPVSRGTAKLRWLVERRFLEPVGKVIDLGCGRGGWCYYMATQKRVQEVRGYTKGGPGHEEPQLVQSYGWNIVTMKSGVDVFYRPSECCDTLLCDIGESSSSAEVEEHRTLRVLEMVEDWLHRGPKEFCVKVLCPYMPKVIEKMELLQRRYGGGLVRNPLSRNSTHEMYWVSRASGNVVHSVNMTSQVLLGRMEKKTWKGPQYEEDVNLGSGTRAVGKPLLNSDTSKIKNRIERLRREYSSTWHHDENHPYRTWNYHGSYEVKPTGSASSLVNGVVRLLSKPWDTITNVTTMAMTDTTPFGQQRVFKEKVDTKAPEPPEGVKYVLNETTNWLWAFLAREKRPRMCSREEFIRKVNSNAALGAMFEEQNQWRSAREAVEDPKFWEMVDEEREAHLRGECHTCIYNMMGKREKKPGEFGKAKGSRAIWFMWLGARFLEFEALGFLNEDHWLGRKNSGGGVEGLGLQKLGYILREVGTRPGGRIYADDTAGWDTRITRADLENEAKVLELLDGEHRRLARAIIELTYRHKVVKVMRPAADGRTVMDVISREDQRGSGQVVTYALNTFTNLAVQLVRMMEGEGVIGPDDVEKLTKGKGPKVRTWLSENGEERLSRMAVSGDDCVVKPLDDRFATSLHFLNAMSKVRKDIQEWKPSTGWYDWQQVPFCSNHFTELIMKDGRTLVTPCRGQDELVGRARISPGAGWNVRDTACLAKSYAQMWLLLYFHRRDLRLMANAICSAVPVNWVPTGRTTWSIHAGGEWMTTEDMLEVWNRVWIEENEWMEDKTPVEKWSDVPYSGKREDIWCGSLIGTRARATWAENIQVAINQVRSIIGDEKYVDYMSSLKRYEDTTLVEDTVL

SEQ ID NO: 27 - DNA, 11683 bp, Artificial Sequence
  synthetic
gggtcggcatggcatctccacctcctcgcggtccgacctgggcatccgaaggaggacgtcgtccactcggatggctaagggagagccacttttctctcgattctctatcggaatctagggagctcggatccagacatgataagatacattgatgagtttggacaaaccacaactagaatgcagtgaaaaaaatgctttatttgtgaaatttgtgatgctattgctttatttgtaaccattataagctgcaataaacaagttaacaacaacaattgctcgagggggggcccggtaccttgaagctgtccctgatggtcgtcatctacctgcctggacagcatggcctgcaacgcgggcatcccgatgccgccggaagcgagaagaatcataatggggaaggccatccagcctcgcgtcggcgcttaaggatcatgatgataaacaatgtatggtgctaatgttgcttcaacaacaattctgttgaactgtgttttcatgtttgccaacaagcacctttatactcggtggcctccccaccaccaacttttttgcactgcaaaaaaacacgcttttgcacgcgggcccatacatagtacaaactctacgtttcgtagactattttacataaatagtctacaccgttgtatacgctccaaatacactaccacacattgaacctttttgcagtgcaaaaaagtacgtgtcggcagtcacgtaggccggccttatcgggtcgcgtcctgtcacgtacgaatcacattatcggaccggacgagtgttgtcttatcgtgacaggacgccagcttcctgtgttgctaaccgcagccggacgcaactccttatcggaacaggacgcgcctccatatcagccgcgcgttatctcatgcgcgtgaccggacacgaggcgcccgtcccgcttatcgcgcctataaatacagcccgcaacgatctggtaaacagtagttcgcctgtgtgagctgacaaacttagtagtgtttgtgaggattttgaacaattaacacagtgcgagctgtttcttagcacgaagatctcgatgtctaagaaaccaggagggcccggcaaaagccgggctgtcaatatgctaaaacgcggaatgccccgcgtgttgtccttgactggactgaagagggcaatgttgagcctgattgacggtagggggcccacacggtttgtgttggctctcttggcgttttttaggttcacggcaattgctccgacccgggcagtgctggatcgatggagaagtgtgaacaaacaaacagcgatgaaacatctcctgagtttcaagaaggaactaggaaccttgaccagtgctatcaaccggcggagctcaaaacagaagaagagaggaggaaagaccggaattgcattcatgattggcttgattgctggcgtgggagcagtggtgattgacatgcaagtttctaccactagaggcacggaaatttttgaaggggagacgaaccggacagactacttgcatctgctcaagttacccgctgatggttgctggagtggcatccttgtcacaaagaagtgcccaaaagtgactgacttggcaaaggacctcgagtcgacagattgcggatcaacgtggactgagttcacattgcggtatcggagatgcgtcgtgaagaaacgtgaaaagcgatcacgtgaacccccgaaagcggatttgctagctgaaatggagatcattgcgttcaagaccattcgcgaaaataagacaatcttcatcgtggccctattgtgtgtggctatcgcgaagcgttggcccacctgggttgtgattcttctggcaattggcacttggaccacagtaaagggggagtttgttgaaccgttatacacgctgaaagcggaacagatgaccatgctacagaccatcgtgagaccggaggaagggtacgtcgtggccacgccaaacggtctcctcgagtttaaaacaggaccggcggagatctacggggggcaatggctgcgcgagttactcgcagattgccacgtcaacgcatcctattcgactgacgtgtgtcccggtggatcgcagctcaacatggcagatatcatggccaaggaacgagtatgctcgacccaaccatacaaccgcggttggggcactgggtgcttcaagtgggggattggattcgttggaacgtgcgtcgaactccattgcgacagaggattcaacgtttcttctatcgctaggtcagctattgttatgaacgttacggctagcttccactccgttagtgacacacaacagatggttggcgacataccgctcacatttaggtttgcgaaactcggaaacgcggcgatgacctgcaggttggagtctgagcagttgctgcttgattactatcatgttacgggaagctcccatgaggggctgtttttgcggtctcaagttgacagttggcctggcgtgcactctactgctagtggtcggcacggcatggagaaagttgttgtgtggggagatgctaggtccaatgagattctagtaaaaaacgtaattgaaccttcgttgtcctgggaagacgcgatcgccactcatggtggattccgtgacatctcctttgtttgtcagattatgctcgacaaactagtcagtggagcttttcgagattgtccaggcccaaaaatatccactttttcccaggacggcttcgggtatagtggagtggtgataaccaccctcaccgcttcttctaatgagacctgttcgcttagcttaacgtgtcacggttgtctgctgcaatccacaaaaatgatctttctcgcagggaagaccacttctcgggcatttgtcaagtgcgggaaccatacaagcaccttgctcgttgggagcacttcagtttctattgagtgcgcccttaaccctatctcgcaaggatggcgcctagcccgacacgtggtggatcggtatcgacggtttggcgtgtctggtgttgcgggagtgtggcaggatctggtcggaaagttttcggttggtgccttcttctccaacacagcccttctggtcattctcgtcctcgctgccttgattgacaaacgcatagcctttctattggttttaggggggtacttttactatgtgcgggctgatactggatgtgccatagatataagtcggcaagagttgaggtgtggcagcggagtatttatacacaatgatgtggaagcttggatggaccgatacaagtactaccctgaaacaccacaaggtctagctaagatcattcaaaaggctcacaaggaaggagtgtgcggtctacgatcagtttctagattggaacaccaaatgtgggaagcagtgaaggatgaactaaacactcttttgaaggaaaatggtgtggaccttagtattgtggttgagaaacaggaggggatgtacaaatcagcacctagacgcctgactgccaccactgagaaactggaaataggctggaaagcctgggggaagagcattctgttcgcaccagaactggccaacaacacttttgtgattgatggtccggagaccaaggagtgtccaacccagaaccgtgcctggaacagcttggaggtggaagattttggattcggcctcaccagcactcggatgttcttgagggtcagagaaagcaacacgactgaatgtgactcaaagatcatcgggacagccgtcaagaataacttggcgatccatagcgatctatcctactggattgaaagcaggtttaatgacacgtggaagctcgaaagggcggtcctaggtgaagtcaaatcatgcacgtggccggaaacacataccctgtggggtgacggggtccttgagagtgacctaataataccaatcacgctagcgggactgcgaagcaaccacaaccggaggcctgggtataaaacacaaagccagggtccatgggatgaaggtcgagtggagattgactttgattactgtccagggacaacggtcactctgagtgagagctgcgggcatcgtggacctgccacccgcaccactacagagagtggaaagctgataacggactggtgctgtaggagctgcaccttacctccattgcgctaccagacagacaatggttgttggtatggcatggagattaggccacagagacatgatgaaaaaactcttgtgcagtcacaggtgaatgcctacaacgctgacatgattgatccttttcagctgggccttctggtcgtgttcttggccacccaggaggtccttcgcaagaggtggacagccaagatcagcatgccagccatactgattgccctgctagttctagtgtttgggggcatcacttacactgatgtgttacgctatgtcattctggtgggggcggcctttgcagaatccaactcaggaggagatgtggtgcatctggcgctcatggcaaccttcaagatacaaccagtgttcatggtagcatcatttctcaaggcgagatggaccaaccaagaaaacattctgctgatgttggcagctgctttcttccaaatggcttactatgatgcccggcaaattttgctttgggaaatgcctgatgtattgaattcattggcagtggcttggatgatattgagagcgataacgttcaccacaacatctaatgtggtcgtcccgctgctggccttgttaacacctggattgagatgcctaaacctggatgtgtacaggatcctgctactgatggttggaataggcagtttgatcagggaaaaaagaagtgcagctgcaaaaaagaaaggagccagtctgctatgtttggctctagcctcaacaggattttttaaccccatgatccttgctgctggacttgtcgcatgtgatcccaatcgcaagcgggggtggcctgcaactgaagtgatgacagctgtcggcttaatgtttgccatcgttggagggcttgcagaactggacatagactccatggccattccaatgactatcgcagggctcatgtttgctgcttttgtgatctctggaaaatcgaccgacatgtggattgagaggacagcggacatctcctgggagggtgatgcggaaatcacaggttccagtgaaagagttgatgttcggcttgacgatgacgggaacttccagctcatgaatgatccaggagcaccttggaaaatatggatgctccgtatggcttgcctggcaatcagcgcgtacaccccttgggctattttgccttcagtagttggattttggataactctccaatacacaaagagaggaggtgtgctgtgggacactccctctccaaaggagtacaagagaggggacacgaccactggtgtctataggatcatgactcgtggattacttggtagttaccaagcaggagcaggcgtgatggttgaaggtgttttccacaccctctggcacacgacaaaaggagccgctctgatgagcggagaaggccgcctggatccatattggggcagcgtcaaggaggatcgactttgttatggtggaccctggaaactgcagcacaagtggaatgggcaagatgaggtgcaaatgattgtggtggaaccagggaagaatgtcaagaacgtccagactaagccgggggtgttcaaaacacctgaaggggagatcggggccgtgactctggatttccccactggaacatcaggctcgcccatagtggacaaaaacggtgatgtgattgggctttatggcaacggagtcataatgcccaatggctcatacataagcgcgatagtgcaaggtgaaaggatggatgagccggttcccgccggattcgaacctgagatgttgaggaaaaaacagatcaccgttttggatcttcaccctggtgctggtaaaacaaggaggattctgccacagatcatcaaagaggctataaacaggaggctgaggacggctgtgctggcgccaactagggttgtggccgctgagatggctgaagccctaagaggattgcctatccgataccaaacatctgcggtggccagagagcacaatggaaatgagatcgtcgacgtcatgtgccatgcaaccctcacccataggctgatgtctcctcatagggtgcctaattacaacctatttgtgatggacgaggcccacttcaccgacccagccagcatcgcggctagaggatacatttccacgagagttgagctgggggaggcagctgcaatattcatgactgccaccccaccaggtacctcagacccatttccagagtccaatgcaccaatatccgacttacagaccgaaatcccggaccgagcctggaactcagggtatgagtggattacagaatatatcgggaagacggtttggtttgtgcctagtgtgaagatgggaaatgagatagccctctgtctgcagcgcgctggcaaaaaagtcatccagctaaacagaaagtcgtacgagacagagtatccaaaatgcaagaacgatgattgggactttgtcgtcacaacagatatatctgagatgggagcaaactttaaggcaagcagggtgattgacagccggaagagtgtgaaaccgactatcatcacggaaggagagggaagagtgatcttgggggaaccatccgctgtgacggcagccagtgcagcccagagacgaggacgcattggtaggaatccatcacaagttggagatgagtactgctatggagggcacacgaatgaggatgactcgaactgtgctcactggactgaggcacgaatcatgctcgataacatcaacatgccaaacggattgattgctcaattctaccaaccagagcgcgagaaggtatacaccatggacggggaataccgacttagaggagaggagaggaaaaacttcctggaattgttgagaactgcagacttgccagtatggctagcttataaggtggcagcagctggggtgtcatatcatgaccggaggtggtgttttgatggccctaggacaaatacaatccttgaagacaacaatgaagtggaagtcatcacaaagcttggtgaaaggaagattctgaggccacgctggattgatgcaagggtgtactcagaccatcaggcgctgaaatcattcaaggacttcgcctcagggaagcgctctcaaataggttttatcgaggtccttggaaagatgcctgaacatttcatggggaagacatgggaagcactcgacaccatgtatgttgtagccactgcagagaaaggaggaagagctcacagaatggctttggaggagctaccagacgccctccaaacaatagctctgatcgctctgttgagtgtgatgaccatgggagtgttttttcttctcatgcagaggaagggcatcggaaagataggcctgggaggcgttgtcctgggagccgcaacctttttctgttggatggctgaagtaccaggaacgaagattgccggaatgctgctgctttccctccttctgatgatcgtgttgattcctgagccagagaagcaacgctcgcagacagacaaccagctagctgtgttcctgatttgcgtgttgacccttgtgggtgcggtggcagccaatgagatgggttggctggacaagaccaagagtgacataagcggtctgtttgggcaaagaattgaaaccaaggagaattttagcattggggagttccttttggacctgaggccggcaacggcttggtcactgtatgctgtgactacagcagttctcactcccttgctaaagcacttgatcacgtcagactacatcaacacctcattgacctcaataaatgttcaagctagtgcgctattcacgctcgcgcgaggcttcccttttgtcgatgttggagtatcggctctcctgctagcagccggatgctggggacaagtcactctcaccgtgacggtgacatcagcaacacttctgttctgccattatgcctacatggtacctggatggcaggctgaggcaatgcgctcagcccagcgacgaacagccgctggaatcatgaaaaacgctgtggtagacggcatcgtggccacggacgttccagagctagagcgtaccacacccatcatgcagaagaaggttggacaagttatgctgattttggtgtctcttgccgcattggtggtaaacccgtctgtgaagacagtgcgggaagccggaattctgattacggcagcagctgttaccctctgggagaacggagcaagctctgtgtggaacgcaacaaccgccataggactttgtcacatcatgcgcggaggctggttatcgtgtttatccataacatggactcttgtaaaaaacatggaaaaaccagggctgaagagaggtggggcaaaaggacgcaccttgggggaggtttggaaagaaagacttaaccagatgacgaaagaagaattcatcaggtaccgtaaagaagccatcactgaagttgaccgctcagcagcaaaacacgctaggaaggaaaggaatatcactggagggcatccagtttctagaggcacggcaaagctaagatggctggtcgagaggaggtttcttgaaccggtcggaaaagtgatcgaccttggatgtggaagaggcggctggtgttattacatggccacacaaaaaagagtccaagaagtcagagggtacacaaaaggtggtcccggacatgaagagccccagctagtgcagagctatggatggaacattgtcaccatgaagagtggggtggatgtgttctataggccttctgaatgttgtgacactctcctttgtgatatcggagagtcctcatcaagtgctgaagttgaagaacatagaacgctacgagtccttgaaatggtggaagactggttgcatcgagggccaaaggaattttgtgtgaaggtactgtgcccctacatgccaaaggtcatagaaaagatggagctgctccaacgccggtatggcgggggattggttaggaacccactctcacggaattccacacatgaaatgtattgggtgagtcgagcctcaggcaatgtggtgcactcagtgaacatgaccagccaggtactcttaggaaggatggagaagaagacctggaagggacctcagtacgaagaagacgtgaacttgggaagcggaacgagagcagtgggaaaacctctactcaactcagacaccagcaagataaagaacaggattgaacgacttaggcgtgagtacagctcgacatggcatcatgatgagaaccacccatatagaacctggaactaccacggtagctacgaagtgaagccaacaggctctgcaagctcactggtcaatggagtggtcaggctcctctcgaaaccatgggacaccatcacaaatgtcaccacaatggccatgacggacaccaccccttttggacaacagcgagtgttcaaagagaaggtggacacgaaagctccggaaccgccagaaggagtgaagtatgtgctcaatgaaaccaccaactggttgtgggcgttcctggcacgagaaaagcgtcccagaatgtgctcgcgagaggaatttataaggaaggtcaatagtaatgcagctctgggcgccatgtttgaggagcagaatcaatggaggagtgctagagaagcggttgaagatccaaaattctgggaaatggtggatgaagagcgtgaggcgcacttacgcggagaatgtcatacttgcatttacaacatgatgggaaagagggagaaaaaacccggagagtttgggaaagccaagggaagcagggccatctggtttatgtggctgggagctcgcttcctagagtttgaggctctgggctttcttaatgaggaccactggcttggaagaaagaactcggggggcggggtcgagggtctgggcctccagaaattaggctacatcctgcgtgaagttggcacccgacccggaggcagaatctacgctgatgacacagccggttgggacacccgcatcacaagagctgacctggagaatgaagccaaggttcttgagttgttggacggggagcaccggcgcctggccagggccatcattgagctcacctatcgccacaaagtagtgaaggtaatgcgcccggctgctgatggaagaaccgtcatggacgtcatctccagggaagaccagagaggaagtgggcaagttgtcacctacgctctaaacacctttaccaacctggctgtccaattggtgagaatgatggaaggagagggtgtgatcggcccagatgatgtggagaaactcacaaaggggaaagggcccaaggttagaacctggctgtctgagaatggggaggaaagactcagccgcatggctgtcagtggagatgactgtgtggtaaagcccttggatgatcgctttgccacctctctccactttctcaacgccatgtcaaaggtgcgcaaggacatccaagagtggaaaccatcaaccggatggtatgattggcagcaagttccattctgttcaaaccacttcactgaactgatcatgaaagatggaagaacactggtgactccatgccgagggcaggatgagttagtgggcagagctcgcatctccccaggggctggatggaatgttcgagacactgcttgcttagccaaatcttatgctcagatgtggttgctcctgtacttccacagaagagatctgcggttgatggccaacgccatctgctctgccgtacctgtaaactgggtccctactggaagaaccacatggtccatccacgctggaggagagtggatgacaacggaagacatgctggaggtctggaatcgtgtctggattgaggaaaatgaatggatggaggacaaaaccccagtggagaagtggagtgatgttccatactctggcaaacgagaggacatttggtgtggcagcctgattggcacaagagcccgggccacgtgggcagaaaacattcaagtggccatcaaccaagtcagatcaataattggagatgagaaatatgtggattacatgagttcattgaagagatatgaagacacaacattggttgaggatacagtattgtaaatactttgttaattgtaaataaatattgttattatgtgtagaagtttagctttataatagtgtttagtgtgtttagagttagaaaaattttagtgaggaagtcaggccggaaaattcccgccaccggaagttgagtagacggtgctgcctgcgactcaaccccaggaggactgggtgaacaaagctgcgaagtgatccatgtaagccctcagaaccgtctcggaaagaggaccccacatgttgtagcttcaaggcccaatgtcagaccacgccatggcgtgccactctgcggagagtgcagtctgcgacagtgccccaggaggactgggtgaacaaaggcgaatcaacgtcccacgcggccctagctctggcaatggtgttaaccagagtgaaaggactagaggttagaggagaccccgcgttctgaagtgcacggcccagcctggctgaagctgtaggtcaggggaaggactagaggttagtggagaccccgtgccgcaaaacaccacaacaacacagcatattgacacctgggatagactaggagatcttctgctctgcacaaccagccacacggcacagtgcgccgacaatggtggctggtggtgcgagaacacaggatct

SEQ ID NO: 28 - protein, 3339 aa, Artificial Sequence
  synthetic
  misc_feature (558)..(558): Xaa can be any naturally occurring amino acid
  misc_feature (621)..(622): Xaa can be any naturally occurring amino acid
MSKKPGGPGKSRAVNMLKRGMPRVLSLTGLKRAMLSLIDGRGPTRFVLALLAFFRFTAIAPTRAVLDRWRSVNKQTAMKHLLSFKKELGTLTSAINRRSSKQKKRGGKTGIAFMIGLIAGVGAKTMNGIMDKGEHVWKADWNVDFTNVKLPKDFCGSGIHVEKMCPQVDSLQDATIDCAGRHDQFLLSYTRCAAKNRVKRGEPGVVEPKVTNIWTITFNDELNSIIERVSGMLKNNRLMATAVICLVGAFKKWPTWLVVLLVLLPWTVVQASLADPFLILPKGDGLVKTRLYPGQISSISTHVGVLDISYMAVDIEEGRLVERLMSHCEVNGTYSQDCCALGCNLDLSKLNERNRACQTATYNRGWATGCPVFGLGSVATCVEVACSDSVEVSELTSQNIRIPLSLRLQHEELNVTMTTEAPVTSKFSHHGVVSISCQIGNPGFLAQQYVLSNGKHKAMFPISAVSGWPGIREIGGQYRNVDGSVKWGHVEANEIKVAAVYSDSIQWKTGIPIKTGIRDPLYLYCEVSLTDLTFKKIRACESPVEVSFMAGPTGLDGXLEIGLLEQVNKTCSITGSCEGCTLPHPTSVISTSDKKGHMHVECRTGTFTAIFGKQKFSFTCXXSYLRTIWATTAQAIGNYRKFGLDASGGPFLDLWNKIGPNFSRLEVVGILVVAALLIDKRLLLLLAIFGYVTYVRADTGCAIDISRQELRCGSGVFIHNDVEAWMDRYKYYPETPQGLAKIIQKAHKEGVCGLRSVSRLEHQMWEAVKDELNTLLKENGVDLSIVVEKQEGMYKSAPRRLTATTEKLEIGWKAWGKSILFAPELANNTFVIDGPETKECPTQNRAWNSLEVEDFGFGLTSTRMFLRVRESNTTECDSKIIGTAVKNNLAIHSDLSYWIESRFNDTWKLERAVLGEVKSCTWPETHTLWGDGVLESDLIIPITLAGLRSNHNRRPGYKTQSQGPWDEGRVEIDFDYCPGTTVTLSESCGHRGPATRTTTESGKLITDWCCRSCTLPPLRYQTDNGCWYGMEIRPQRHDEKTLVQSQVNAYNADMIDPFQLGLLVVFLATQEVLRKRWTAKISMPAILIALLVLVFGGITYTDVLRYVILVGAAFAESNSGGDVVHLALMATFKIQPVFMVASFLKARWTNQENILLMLAAAFFQMAYYDARQILLWEMPDVLNSLAVAWMILRAITFTTTSNVVVPLLALLTPGLRCLNLDVYRILLLMVGIGSLIREKRSAAAKKKGASLLCLALASTGFFNPMILAAGLVACDPNRKRGWPATEVMTAVGLMFAIVGGLAELDIDSMAIPMTIAGLMFAAFVISGKSTDMWIERTADISWEGDAEITGSSERVDVRLDDDGNFQLMNDPGAPWKIWMLRMACLAISAYTPWAILPSVVGFWITLQYTKRGGVLWDTPSPKEYKRGDTTTGVYRIMTRGLLGSYQAGAGVMVEGVFHTLWHTTKGAALMSGEGRLDPYWGSVKEDRLCYGGPWKLQHKWNGQDEVQMIVVEPGKNVKNVQTKPGVFKTPEGEIGAVTLDFPTGTSGSPIVDKNGDVIGLYGNGVIMPNGSYISAIVQGERMDEPVPAGFEPEMLRKKQITVLDLHPGAGKTRRILPQIIKEAINRRLRTAVLAPTRVVAAEMAEALRGLPIRYQTSAVAREHNGNEIVDVMCHATLTHRLMSPHRVPNYNLFVMDEAHFTDPASIAARGYISTRVELGEAAAIFMTATPPGTSDPFPESNAPISDLQTEIPDRAWNSGYEWITEYIGKTVWFVPSVKMGNEIALCLQRAGKKVIQLNRKSYETEYPKCKNDDWDFVVTTDISEMGANFKASRVIDSRKSVKPTIITEGEGRVILGEPSAVTAASAAQRRGRIGRNPSQVGDEYCYGGHTNEDDSNCAHWTEARIMLDNINMPNGLIAQFYQPEREKVYTMDGEYRLRGEERKNFLELLRTADLPVWLAYKVAAAGVSYHDRRWCFDGPRTNTILEDNNEVEVITKLGERKILRPRWIDARVYSDHQALKSFKDFASGKRSQIGFIEVLGKMPEHFMGKTWEALDTMYVVATAEKGGRAHRMALEELPDALQTIALIALLSVMTMGVFFLLMQRKGIGKIGLGGVVLGAATFFCWMAEVPGTKIAGMLLLSLLLMIVLIPEPEKQRSQTDNQLAVFLICVLTLVGAVAANEMGWLDKTKSDISGLFGQRIETKENFSIGEFLLDLRPATAWSLYAVTTAVLTPLLKHLITSDYINTSLTSINVQASALFTLARGFPFVDVGVSALLLAAGCWGQVTLTVTVTSATLLFCHYAYMVPGWQAEAMRSAQRRTAAGIMKNAVVDGIVATDVPELERTTPIMQKKVGQVMLILVSLAALVVNPSVKTVREAGILITAAAVTLWENGASSVWNATTAIGLCHIMRGGWLSCLSITWTLVKNMEKPGLKRGGAKGRTLGEVWKERLNQMTKEEFIRYRKEAITEVDRSAAKHARKERNITGGHPVSRGTAKLRWLVERRFLEPVGKVIDLGCGRGGWCYYMATQKRVQEVRGYTKGGPGHEEPQLVQSYGWNIVTMKSGVDVFYRPSECCDTLLCDIGESSSSAEVEEHRTLRVLEMVEDWLHRGPKEFCVKVLCPYMPKVIEKMELLQRRYGGGLVRNPLSRNSTHEMYWVSRASGNVVHSVNMTSQVLLGRMEKKTWKGPQYEEDVNLGSGTRAVGKPLLNSDTSKIKNRIERLRREYSSTWHHDENHPYRTWNYHGSYEVKPTGSASSLVNGVVRLLSKPWDTITNVTTMAMTDTTPFGQQRVFKEKVDTKAPEPPEGVKYVLNETTNWLWAFLAREKRPRMCSREEFIRKVNSNAALGAMFEEQNQWRSAREAVEDPKFWEMVDEEREAHLRGECHTCIYNMMGKREKKPGEFGKAKGSRAIWFMWLGARFLEFEALGFLNEDHWLGRKNSGGGVEGLGLQKLGYILREVGTRPGGRIYADDTAGWDTRITRADLENEAKVLELLDGEHRRLARAIIELTYRHKVVKVMRPAADGRTVMDVISREDQRGSGQVVTYALNTFTNLAVQLVRMMEGEGVIGPDDVEKLTKGKGPKVRTWLSENGEERLSRMAVSGDDCVVKPLDDRFATSLHFLNAMSKVRKDIQEWKPSTGWYDWQQVPFCSNHFTELIMKDGRTLVTPCRGQDELVGRARISPGAGWNVRDTACLAKSYAQMWLLLYFHRRDLRLMANAICSAVPVNWVPTGRTTWSIHAGGEWMTTEDMLEVWNRVWIEENEWMEDKTPVEKWSDVPYSGKREDIWCGSLIGTRARATWAENIQVAINQVRSIIGDEKYVDYMSSLKRYEDTTLVEDTVL

SEQ ID NO: 29 - DNA, 11698 bp, Artificial Sequence
  synthetic
gggtcggcatggcatctccacctcctcgcggtccgacctgggcatccgaaggaggacgtcgtccactcggatggctaagggagagccacttttctctcgattctctatcggaatctagggagctcggatccagacatgataagatacattgatgagtttggacaaaccacaactagaatgcagtgaaaaaaatgctttatttgtgaaatttgtgatgctattgctttatttgtaaccattataagctgcaataaacaagttaacaacaacaattgctcgagggggggcccggtaccttgaagctgtccctgatggtcgtcatctacctgcctggacagcatggcctgcaacgcgggcatcccgatgccgccggaagcgagaagaatcataatggggaaggccatccagcctcgcgtcggcgcttaaggatcatgatgataaacaatgtatggtgctaatgttgcttcaacaacaattctgttgaactgtgttttcatgtttgccaacaagcacctttatactcggtggcctccccaccaccaacttttttgcactgcaaaaaaacacgcttttgcacgcgggcccatacatagtacaaactctacgtttcgtagactattttacataaatagtctacaccgttgtatacgctccaaatacactaccacacattgaacctttttgcagtgcaaaaaagtacgtgtcggcagtcacgtaggccggccttatcgggtcgcgtcctgtcacgtacgaatcacattatcggaccggacgagtgttgtcttatcgtgacaggacgccagcttcctgtgttgctaaccgcagccggacgcaactccttatcggaacaggacgcgcctccatatcagccgcgcgttatctcatgcgcgtgaccggacacgaggcgcccgtcccgcttatcgcgcctataaatacagcccgcaacgatctggtaaacagtagttcgcctgtgtgagctgacaaacttagtagtgtttgtgaggattttgaacaattaacacagtgcgagctgtttcttagcacgaagatctcgatgtctaagaaaccaggagggcccggcaaaagccgggctgtcaatatgctaaaacgcggaatgccccgcgtgttgtccttgactggactgaagagggcaatgttgagcctgattgacggtagggggcccacacggtttgtgttggctctcttggcgttttttaggttcacggcaattgctccgacccgggcagtgctggatcgatggagaagtgtgaacaaacaaacagcgatgaaacatctcctgagtttcaagaaggaactaggaaccttgaccagtgctatcaaccggcggagctcaaaacagaagaagagaggaggaaagaccggaattgcattcatgattggcttgattgctggcgtgggagcaaagaccatgaatggaataatggacaagggtgagcacgtttggaaagctgactggaatgttgactttaccaatgtgaagctccccaaggacttctgcggatctggaatacacgtggagaagatgtgtcctcaggttgattctttgcaagatgcaacaatcgactgcgcaggaagacatgaccaatttctcctgtcctatacacgatgtgcggctaagaatcgtgtcaaacgtggtgaacccggagtagtggaaccgaaagtcacgaacatatggaccataacgttcaatgatgagttgaacagcatcattgaacgtgtgagcgggatgctgaagaacaatcgattgatggcaacagcagtcatttgcttagttggggctttcaagaaatggcctacatggctcgtcgtgcttttggttttactgccttggactgtcgtgcaggcatcactggccgatcctttcttaattctgccgaagggtgatggtttggtaaaaactagattatacccaggacagatttcatcaatttccacacacgttggggtactggacatctcttatatggctgtggacattgaggaggggcgactcgttgaaaggttgatgtcacattgcgaagtaaatggaacttactcacaggattgttgcgctttgggatgcaacttggacttatctaagttaaatgagcggaacagggcctgtcaaacggctacctacaatcgcgggtgggctacgggatgtccagtttttggactgggcagtgtggccacatgcgttgaggtcgcgtgcagcgatagtgtggaggtgtccgaactgacaagccagaacatccggattcctctatctctacgtttgcagcatgaagagctgaatgtgaccatgacaacagaggcgccagttacttcaaagttctcacatcacggggtggtatccatctcttgtcaaattggcaatcctgggttcttggcacagcagtacgtgctgagcaatgggaagcataaagcaatgtttcccatcagtgcggtatcaggttggcctggaatccgtgagattggtggacagtacaggaacgtggatggctccgtcaagtgggggcacgttgaagcgaatgagattaaggtggccgctgtatatagtgacagcatccaatggaagactggaatcccgataaagacaggtattagagacccactgtatttgtactgtgaagtgtcgctaactgacttgactttcaagaaaataagagcatgtgaatcgcctgttgaagtttcgttcatggcaggacctacgggtttggatggtcgrctagaaattgggttgcttgagcaagtcaacaaaacatgctcaataacagggagctgtgaaggttgtaccttaccgcacccaaccagtgtcatttcgacttctgacaagaaaggccacatgcacgtagaatgtcgcacggggacatttacggcaatattcggaaagcaaaaattttctttcacctgtcrracwagttacctcagaactatttgggctacgactgcccaggcgattggaaattataggaaattcggactggatgcctcaggaggaccatttttggacttatggaataagataggtccaaatttctcccgtttggaggttgttggaatccttgttgtggcagccttgttaattgacaaaagactcttacttctcctggctatttttggatacgtcacatacgtgcgagctgatactggatgtgccatagatataagtcggcaagagttgaggtgtggcagcggagtatttatacacaatgatgtggaagcttggatggaccgatacaagtactaccctgaaacaccacaaggtctagctaagatcattcaaaaggctcacaaggaaggagtgtgcggtctacgatcagtttctagattggaacaccaaatgtgggaagcagtgaaggatgaactaaacactcttttgaaggaaaatggtgtggaccttagtattgtggttgagaaacaggaggggatgtacaaatcagcacctagacgcctgactgccaccactgagaaactggaaataggctggaaagcctgggggaagagcattctgttcgcaccagaactggccaacaacacttttgtgattgatggtccggagaccaaggagtgtccaacccagaaccgtgcctggaacagcttggaggtggaagattttggattcggcctcaccagcactcggatgttcttgagggtcagagaaagcaacacgactgaatgtgactcaaagatcatcgggacagccgtcaagaataacttggcgatccatagcgatctatcctactggattgaaagcaggtttaatgacacgtggaagctcgaaagggcggtcctaggtgaagtcaaatcatgcacgtggccggaaacacataccctgtggggtgacggggtccttgagagtgacctaataataccaatcacgctagcgggactgcgaagcaaccacaaccggaggcctgggtataaaacacaaagccagggtccatgggatgaaggtcgagtggagattgactttgattactgtccagggacaacggtcactctgagtgagagctgcgggcatcgtggacctgccacccgcaccactacagagagtggaaagctgataacggactggtgctgtaggagctgcaccttacctccattgcgctaccagacagacaatggttgttggtatggcatggagattaggccacagagacatgatgaaaaaactcttgtgcagtcacaggtgaatgcctacaacgctgacatgattgatccttttcagctgggccttctggtcgtgttcttggccacccaggaggtccttcgcaagaggtggacagccaagatcagcatgccagccatactgattgccctgctagttctagtgtttgggggcatcacttacactgatgtgttacgctatgtcattctggtgggggcggcctttgcagaatccaactcaggaggagatgtggtgcatctggcgctcatggcaaccttcaagatacaaccagtgttcatggtagcatcatttctcaaggcgagatggaccaaccaagaaaacattctgctgatgttggcagctgctttcttccaaatggcttactatgatgcccggcaaattttgctttgggaaatgcctgatgtattgaattcattggcagtggcttggatgatattgagagcgataacgttcaccacaacatctaatgtggtcgtcccgctgctggccttgttaacacctggattgagatgcctaaacctggatgtgtacaggatcctgctactgatggttggaataggcagtttgatcagggaaaaaagaagtgcagctgcaaaaaagaaaggagccagtctgctatgtttggctctagcctcaacaggattttttaaccccatgatccttgctgctggacttgtcgcatgtgatcccaatcgcaagcgggggtggcctgcaactgaagtgatgacagctgtcggcttaatgtttgccatcgttggagggcttgcagaactggacatagactccatggccattccaatgactatcgcagggctcatgtttgctgcttttgtgatctctggaaaatcgaccgacatgtggattgagaggacagcggacatctcctgggagggtgatgcggaaatcacaggttccagtgaaagagttgatgttcggcttgacgatgacgggaacttccagctcatgaatgatccaggagcaccttggaaaatatggatgctccgtatggcttgcctggcaatcagcgcgtacaccccttgggctattttgccttcagtagttggattttggataactctccaatacacaaagagaggaggtgtgctgtgggacactccctctccaaaggagtacaagagaggggacacgaccactggtgtctataggatcatgactcgtggattacttggtagttaccaagcaggagcaggcgtgatggttgaaggtgttttccacaccctctggcacacgacaaaaggagccgctctgatgagcggagaaggccgcctggatccatattggggcagcgtcaaggaggatcgactttgttatggtggaccctggaaactgcagcacaagtggaatgggcaagatgaggtgcaaatgattgtggtggaaccagggaagaatgtcaagaacgtccagactaagccgggggtgttcaaaacacctgaaggggagatcggggccgtgactctggatttccccactggaacatcaggctcgcccatagtggacaaaaacggtgatgtgattgggctttatggcaacggagtcataatgcccaatggctcatacataagcgcgatagtgcaaggtgaaaggatggatgagccggttcccgccggattcgaacctgagatgttgaggaaaaaacagatcaccgttttggatcttcaccctggtgctggtaaaacaaggaggattctgccacagatcatcaaagaggctataaacaggaggctgaggacggctgtgctggcgccaactagggttgtggccgctgagatggctgaagccctaagaggattgcctatccgataccaaacatctgcggtggccagagagcacaatggaaatgagatcgtcgacgtcatgtgccatgcaaccctcacccataggctgatgtctcctcatagggtgcctaattacaacctatttgtgatggacgaggcccacttcaccgacccagccagcatcgcggctagaggatacatttccacgagagttgagctgggggaggcagctgcaatattcatgactgccaccccaccaggtacctcagacccatttccagagtccaatgcaccaatatccgacttacagaccgaaatcccggaccgagcctggaactcagggtatgagtggattacagaatatatcgggaagacggtttggtttgtgcctagtgtgaagatgggaaatgagatagccctctgtctgcagcgcgctggcaaaaaagtcatccagctaaacagaaagtcgtacgagacagagtatccaaaatgcaagaacgatgattgggactttgtcgtcacaacagatatatctgagatgggagcaaactttaaggcaagcagggtgattgacagccggaagagtgtgaaaccgactatcatcacggaaggagagggaagagtgatcttgggggaaccatccgctgtgacggcagccagtgcagcccagagacgaggacgcattggtaggaatccatcacaagttggagatgagtactgctatggagggcacacgaatgaggatgactcgaactgtgctcactggactgaggcacgaatcatgctcgataacatcaacatgccaaacggattgattgctcaattctaccaaccagagcgcgagaaggtatacaccatggacggggaataccgacttagaggagaggagaggaaaaacttcctggaattgttgagaactgcagacttgccagtatggctagcttataaggtggcagcagctggggtgtcatatcatgaccggaggtggtgttttgatggccctaggacaaatacaatccttgaagacaacaatgaagtggaagtcatcacaaagcttggtgaaaggaagattctgaggccacgctggattgatgcaagggtgtactcagaccatcaggcgctgaaatcattcaaggacttcgcctcagggaagcgctctcaaataggttttatcgaggtccttggaaagatgcctgaacatttcatggggaagacatgggaagcactcgacaccatgtatgttgtagccactgcagagaaaggaggaagagctcacagaatggctttggaggagctaccagacgccctccaaacaatagctctgatcgctctgttgagtgtgatgaccatgggagtgttttttcttctcatgcagaggaagggcatcggaaagataggcctgggaggcgttgtcctgggagccgcaacctttttctgttggatggctgaagtaccaggaacgaagattgccggaatgctgctgctttccctccttctgatgatcgtgttgattcctgagccagagaagcaacgctcgcagacagacaaccagctagctgtgttcctgatttgcgtgttgacccttgtgggtgcggtggcagccaatgagatgggttggctggacaagaccaagagtgacataagcggtctgtttgggcaaagaattgaaaccaaggagaattttagcattggggagttccttttggacctgaggccggcaacggcttggtcactgtatgctgtgactacagcagttctcactcccttgctaaagcacttgatcacgtcagactacatcaacacctcattgacctcaataaatgttcaagctagtgcgctattcacgctcgcgcgaggcttcccttttgtcgatgttggagtatcggctctcctgctagcagccggatgctggggacaagtcactctcaccgtgacggtgacatcagcaacacttctgttctgccattatgcctacatggtacctggatggcaggctgaggcaatgcgctcagcccagcgacgaacagccgctggaatcatgaaaaacgctgtggtagacggcatcgtggccacggacgttccagagctagagcgtaccacacccatcatgcagaagaaggttggacaagttatgctgattttggtgtctcttgccgcattggtggtaaacccgtctgtgaagacagtgcgggaagccggaattctgattacggcagcagctgttaccctctgggagaacggagcaagctctgtgtggaacgcaacaaccgccataggactttgtcacatcatgcgcggaggctggttatcgtgtttatccataacatggactcttgtaaaaaacatggaaaaaccagggctgaagagaggtggggcaaaaggacgcaccttgggggaggtttggaaagaaagacttaaccagatgacgaaagaagaattcatcaggtaccgtaaagaagccatcactgaagttgaccgctcagcagcaaaacacgctaggaaggaaaggaatatcactggagggcatccagtttctagaggcacggcaaagctaagatggctggtcgagaggaggtttcttgaaccggtcggaaaagtgatcgaccttggatgtggaagaggcggctggtgttattacatggccacacaaaaaagagtccaagaagtcagagggtacacaaaaggtggtcccggacatgaagagccccagctagtgcagagctatggatggaacattgtcaccatgaagagtggggtggatgtgttctataggccttctgaatgttgtgacactctcctttgtgatatcggagagtcctcatcaagtgctgaagttgaagaacatagaacgctacgagtccttgaaatggtggaagactggttgcatcgagggccaaaggaattttgtgtgaaggtactgtgcccctacatgccaaaggtcatagaaaagatggagctgctccaacgccggtatggcgggggattggttaggaacccactctcacggaattccacacatgaaatgtattgggtgagtcgagcctcaggcaatgtggtgcactcagtgaacatgaccagccaggtactcttaggaaggatggagaagaagacctggaagggacctcagtacgaagaagacgtgaacttgggaagcggaacgagagcagtgggaaaacctctactcaactcagacaccagcaagataaagaacaggattgaacgacttaggcgtgagtacagctcgacatggcatcatgatgagaaccacccatatagaacctggaactaccacggtagctacgaagtgaagccaacaggctctgcaagctcactggtcaatggagtggtcaggctcctctcgaaaccatgggacaccatcacaaatgtcaccacaatggccatgacggacaccaccccttttggacaacagcgagtgttcaaagagaaggtggacacgaaagctccggaaccgccagaaggagtgaagtatgtgctcaatgaaaccaccaactggttgtgggcgttcctggcacgagaaaagcgtcccagaatgtgctcgcgagaggaatttataaggaaggtcaatagtaatgcagctctgggcgccatgtttgaggagcagaatcaatggaggagtgctagagaagcggttgaagatccaaaattctgggaaatggtggatgaagagcgtgaggcgcacttacgcggagaatgtcatacttgcatttacaacatgatgggaaagagggagaaaaaacccggagagtttgggaaagccaagggaagcagggccatctggtttatgtggctgggagctcgcttcctagagtttgaggctctgggctttcttaatgaggaccactggcttggaagaaagaactcggggggcggggtcgagggtctgggcctccagaaattaggctacatcctgcgtgaagttggcacccgacccggaggcagaatctacgctgatgacacagccggttgggacacccgcatcacaagagctgacctggagaatgaagccaaggttcttgagttgttggacggggagcaccggcgcctggccagggccatcattgagctcacctatcgccacaaagtagtgaaggtaatgcgcccggctgctgatggaagaaccgtcatggacgtcatctccagggaagaccagagaggaagtgggcaagttgtcacctacgctctaaacacctttaccaacctggctgtccaattggtgagaatgatggaaggagagggtgtgatcggcccagatgatgtggagaaactcacaaaggggaaagggcccaaggttagaacctggctgtctgagaatggggaggaaagactcagccgcatggctgtcagtggagatgactgtgtggtaaagcccttggatgatcgctttgccacctctctccactttctcaacgccatgtcaaaggtgcgcaaggacatccaagagtggaaaccatcaaccggatggtatgattggcagcaagttccattctgttcaaaccacttcactgaactgatcatgaaagatggaagaacactggtgactccatgccgagggcaggatgagttagtgggcagagctcgcatctccccaggggctggatggaatgttcgagacactgcttgcttagccaaatcttatgctcagatgtggttgctcctgtacttccacagaagagatctgcggttgatggccaacgccatctgctctgccgtacctgtaaactgggtccctactggaagaaccacatggtccatccacgctggaggagagtggatgacaacggaagacatgctggaggtctggaatcgtgtctggattgaggaaaatgaatggatggaggacaaaaccccagtggagaagtggagtgatgttccatactctggcaaacgagaggacatttggtgtggcagcctgattggcacaagagcccgggccacgtgggcagaaaacattcaagtggccatcaaccaagtcagatcaataattggagatgagaaatatgtggattacatgagttcattgaagagatatgaagacacaacattggttgaggatacagtattgtaaatactttgttaattgtaaataaatattgttattatgtgtagaagtttagctttataatagtgtttagtgtgtttagagttagaaaaattttagtgaggaagtcaggccggaaaattcccgccaccggaagttgagtagacggtgctgcctgcgactcaaccccaggaggactgggtgaacaaagctgcgaagtgatccatgtaagccctcagaaccgtctcggaaagaggaccccacatgttgtagcttcaaggcccaatgtcagaccacgccatggcgtgccactctgcggagagtgcagtctgcgacagtgccccaggaggactgggtgaacaaaggcgaatcaacgtcccacgcggccctagctctggcaatggtgttaaccagagtgaaaggactagaggttagaggagaccccgcgttctgaagtgcacggcccagcctggctgaagctgtaggtcaggggaaggactagaggttagtggagaccccgtgccgcaaaacaccacaacaacacagcatattgacacctgggatagactaggagatcttctgctctgcacaaccagccacacggcacagtgcgccgacaatggtggctggtggtgcgagaacacaggatct

SEQ ID NO: 30 - protein, 3343 aa, Artificial Sequence
  synthetic
MSKKPGGPGKSRAVNMLKRGMPRVLSLTGLKRAMLSLIDGRGPTRFVLALLAFFRFTAIAPTRAVLDRWRSVNKQTAMKHLLSFKKELGTLTSAINRRSSKQKKRGGKTGIAFMIGLIAGVGAVTIQVVVTTDARIELWSDRKNFTAHAHLVKVPTDVCNDGVFVTKHCPKVEKLSDLGEIDCGSSWSEFTLTYTRCVTLERASRAEEKGKTMLGQFKEDLSTLETEAFLLFKKHAFSTILVLLVLAIVMKWPVWVVVILGILAWNVVKGEFVEPFLVLKHDHSTMLMTRLYPGEIAHVATPAGLVDIRVSHAQIFGGQRFRELLSDCSVNASYSTDICPGGSQLDLESIKGPGRVCMTAPYNRGWGTGCFKWGIGAVATCVELNCTRETKVDLLTNSAIVANVTVNFHSTNDTKLLVPDTPITLKFGKLGTMTMTCRLGNDRIANDFYHVTDNIASGLFQKALIDAWEGPSKMANHISGHEKVVKWGHILPNEIKVSKIIEMELDWEKAITTHDGFSNTYFWCQVAVNKLVVGSFASCKSGAKASFIQSSWGFDGVVEVTLDEATKTICSLPLTCTGCSLLATKVVFLEGSQRAVGHVGCGNGTSMLTVGTTKVGIQCVVTPVSQIWNFVTHASGRYAKLGFGGVGGAFHDLLVKVGLTFTWDSWKIITVLSGLVVAFAIFDRKLVILIIILCGIAYTRADTGCAIDISRQELRCGSGVFIHNDVEAWMDRYKYYPETPQGLAKIIQKAHKEGVCGLRSVSRLEHQMWEAVKDELNTLLKENGVDLSIVVEKQEGMYKSAPRRLTATTEKLEIGWKAWGKSILFAPELANNTFVIDGPETKECPTQNRAWNSLEVEDFGFGLTSTRMFLRVRESNTTECDSKIIGTAVKNNLAIHSDLSYWIESRFNDTWKLERAVLGEVKSCTWPETHTLWGDGVLESDLIIPITLAGLRSNHNRRPGYKTQSQGPWDEGRVEIDFDYCPGTTVTLSESCGHRGPATRTTTESGKLITDWCCRSCTLPPLRYQTDNGCWYGMEIRPQRHDEKTLVQSQVNAYNADMIDPFQLGLLVVFLATQEVLRKRWTAKISMPAILIALLVLVFGGITYTDVLRYVILVGAAFAESNSGGDVVHLALMATFKIQPVFMVASFLKARWTNQENILLMLAAAFFQMAYYDARQILLWEMPDVLNSLAVAWMILRAITFTTTSNVVVPLLALLTPGLRCLNLDVYRILLLMVGIGSLIREKRSAAAKKKGASLLCLALASTGFFNPMILAAGLVACDPNRKRGWPATEVMTAVGLMFAIVGGLAELDIDSMAIPMTIAGLMFAAFVISGKSTDMWIERTADISWEGDAEITGSSERVDVRLDDDGNFQLMNDPGAPWKIWMLRMACLAISAYTPWAILPSVVGFWITLQYTKRGGVLWDTPSPKEYKRGDTTTGVYRIMTRGLLGSYQAGAGVMVEGVFHTLWHTTKGAALMSGEGRLDPYWGSVKEDRLCYGGPWKLQHKWNGQDEVQMIVVEPGKNVKNVQTKPGVFKTPEGEIGAVTLDFPTGTSGSPIVDKNGDVIGLYGNGVIMPNGSYISAIVQGERMDEPVPAGFEPEMLRKKQITVLDLHPGAGKTRRILPQIIKEAINRRLRTAVLAPTRVVAAEMAEALRGLPIRYQTSAVAREHNGNEIVDVMCHATLTHRLMSPHRVPNYNLFVMDEAHFTDPASIAARGYISTRVELGEAAAIFMTATPPGTSDPFPESNAPISDLQTEIPDRAWNSGYEWITEYIGKTVWFVPSVKMGNEIALCLQRAGKKVIQLNRKSYETEYPKCKNDDWDFVVTTDISEMGANFKASRVIDSRKSVKPTIITEGEGRVILGEPSAVTAASAAQRRGRIGRNPSQVGDEYCYGGHTNEDDSNCAHWTEARIMLDNINMPNGLIAQFYQPEREKVYTMDGEYRLRGEERKNFLELLRTADLPVWLAYKVAAAGVSYHDRRWCFDGPRTNTILEDNNEVEVITKLGERKILRPRWIDARVYSDHQALKSFKDFASGKRSQIGFIEVLGKMPEHFMGKTWEALDTMYVVATAEKGGRAHRMALEELPDALQTIALIALLSVMTMGVFFLLMQRKGIGKIGLGGVVLGAATFFCWMAEVPGTKIAGMLLLSLLLMIVLIPEPEKQRSQTDNQLAVFLICVLTLVGAVAANEMGWLDKTKSDISGLFGQRIETKENFSIGEFLLDLRPATAWSLYAVTTAVLTPLLKHLITSDYINTSLTSINVQASALFTLARGFPFVDVGVSALLLAAGCWGQVTLTVTVTSATLLFCHYAYMVPGWQAEAMRSAQRRTAAGIMKNAVVDGIVATDVPELERTTPIMQKKVGQVMLILVSLAALVVNPSVKTVREAGILITAAAVTLWENGASSVWNATTAIGLCHIMRGGWLSCLSITWTLVKNMEKPGLKRGGAKGRTLGEVWKERLNQMTKEEFIRYRKEAITEVDRSAAKHARKERNITGGHPVSRGTAKLRWLVERRFLEPVGKVIDLGCGRGGWCYYMATQKRVQEVRGYTKGGPGHEEPQLVQSYGWNIVTMKSGVDVFYRPSECCDTLLCDIGESSSSAEVEEHRTLRVLEMVEDWLHRGPKEFCVKVLCPYMPKVIEKMELLQRRYGGGLVRNPLSRNSTHEMYWVSRASGNVVHSVNMTSQVLLGRMEKKTWKGPQYEEDVNLGSGTRAVGKPLLNSDTSKIKNRIERLRREYSSTWHHDENHPYRTWNYHGSYEVKPTGSASSLVNGVVRLLSKPWDTITNVTTMAMTDTTPFGQQRVFKEKVDTKAPEPPEGVKYVLNETTNWLWAFLAREKRPRMCSREEFIRKVNSNAALGAMFEEQNQWRSAREAVEDPKFWEMVDEEREAHLRGECHTCIYNMMGKREKKPGEFGKAKGSRAIWFMWLGARFLEFEALGFLNEDHWLGRKNSGGGVEGLGLQKLGYILREVGTRPGGRIYADDTAGWDTRITRADLENEAKVLELLDGEHRRLARAIIELTYRHKVVKVMRPAADGRTVMDVISREDQRGSGQVVTYALNTFTNLAVQLVRMMEGEGVIGPDDVEKLTKGKGPKVRTWLSENGEERLSRMAVSGDDCVVKPLDDRFATSLHFLNAMSKVRKDIQEWKPSTGWYDWQQVPFCSNHFTELIMKDGRTLVTPCRGQDELVGRARISPGAGWNVRDTACLAKSYAQMWLLLYFHRRDLRLMANAICSAVPVNWVPTGRTTWSIHAGGEWMTTEDMLEVWNRVWIEENEWMEDKTPVEKWSDVPYSGKREDIWCGSLIGTRARATWAENIQVAINQVRSIIGDEKYVDYMSSLKRYEDTTLVEDTVL

SEQ ID NO: 31 - DNA, 11710 bp, Artificial Sequence
  synthetic
gggtcggcatggcatctccacctcctcgcggtccgacctgggcatccgaaggaggacgtcgtccactcggatggctaagggagagccacttttctctcgattctctatcggaatctagggagctcggatccagacatgataagatacattgatgagtttggacaaaccacaactagaatgcagtgaaaaaaatgctttatttgtgaaatttgtgatgctattgctttatttgtaaccattataagctgcaataaacaagttaacaacaacaattgctcgagggggggcccggtaccttgaagctgtccctgatggtcgtcatctacctgcctggacagcatggcctgcaacgcgggcatcccgatgccgccggaagcgagaagaatcataatggggaaggccatccagcctcgcgtcggcgcttaaggatcatgatgataaacaatgtatggtgctaatgttgcttcaacaacaattctgttgaactgtgttttcatgtttgccaacaagcacctttatactcggtggcctccccaccaccaacttttttgcactgcaaaaaaacacgcttttgcacgcgggcccatacatagtacaaactctacgtttcgtagactattttacataaatagtctacaccgttgtatacgctccaaatacactaccacacattgaacctttttgcagtgcaaaaaagtacgtgtcggcagtcacgtaggccggccttatcgggtcgcgtcctgtcacgtacgaatcacattatcggaccggacgagtgttgtcttatcgtgacaggacgccagcttcctgtgttgctaaccgcagccggacgcaactccttatcggaacaggacgcgcctccatatcagccgcgcgttatctcatgcgcgtgaccggacacgaggcgcccgtcccgcttatcgcgcctataaatacagcccgcaacgatctggtaaacagtagttcgcctgtgtgagctgacaaacttagtagtgtttgtgaggattttgaacaattaacacagtgcgagctgtttcttagcacgaagatctcgatgtctaagaaaccaggagggcccggcaaaagccgggctgtcaatatgctaaaacgcggaatgccccgcgtgttgtccttgactggactgaagagggcaatgttgagcctgattgacggtagggggcccacacggtttgtgttggctctcttggcgttttttaggttcacggcaattgctccgacccgggcagtgctggatcgatggagaagtgtgaacaaacaaacagcgatgaaacatctcctgagtttcaagaaggaactaggaaccttgaccagtgctatcaaccggcggagctcaaaacagaagaagagaggaggaaagaccggaattgcattcatgattggcttgattgctggcgtgggagcagtgacaatccaagtggttgtcactactgatgcacgaatcgagctttggtctgaccggaagaactttacagctcacgctcacctcgtcaaggttcctaccgacgtttgcaatgatggggtgtttgtaacaaaacattgtcccaaagttgagaagttgagtgaccttggcgaaatcgattgcggttcatcatggtctgaatttaccttgacttacacacgatgcgtaaccttggaaagagcctcacgtgcggaagagaagggaaagacaatgctggggcagttcaaggaggatctttccaccctggaaactgaggcttttttgctgtttaaaaaacatgcgttctcgaccatcctggttttgctagtattggccatcgttatgaagtggcccgtgtgggttgtggtaatactggggattctagcgtggaacgtcgtgaaaggtgagtttgttgagccattcttggttttaaaacatgaccacagtactatgctcatgaccagactgtacccaggagaaatcgctcacgttgcaactcctgccgggttggtggacattcgtgttagccatgcccaaatttttggaggtcaacgctttcgtgagttactgagcgactgctctgtgaacgcttcgtattcgaccgacatatgccccggaggatcacaacttgacttggaatcgatcaaaggtcctggacgtgtctgcatgaccgctccgtacaatcgaggatggggaaccggatgtttcaaatggggaattggagctgttgccacgtgcgttgagttgaactgcacacgggaaacaaaagttgatttgttgacaaattctgctattgtggccaacgtgacagtcaatttccactcgaccaatgacactaaactccttgtgcctgacaccccaattacgttgaagtttgggaagttaggaacgatgacaatgacgtgtcgtttgggaaatgaccgcattgctaacgatttttaccatgtaactgacaatattgcatctggactgttccagaaagctttgattgatgcgtgggaaggaccctccaagatggcgaaccacattagcggacatgaaaaagtcgtgaagtggggtcacattctcccaaatgagatcaaggtcagcaagatcattgaaatggagttagattgggaaaaggcgatcaccacacatgatggattttcgaacacctatttttggtgtcaagtggccgtgaacaagttggtcgttgggtcatttgcctcatgcaagagcggagcgaaggctagcttcatccaatcctcgtggggttttgatggtgtggttgaagtgactttggatgaggccaccaaaaccatttgctccctacccctgacatgtaccggatgtagcttgttggctacaaaagtggttttccttgagggaagccagcgggctgttgggcacgtggggtgtggaaatggaacatcaatgttgacagtaggaacgacaaaggttgggatccaatgtgtggtcacaccggtgtcacaaatttggaacttcgtgactcacgcttccggacgatatgcgaaacttggttttggaggagttggaggagctttccatgatctgctagtgaaggttggattgaccttcacctgggattcatggaagatcatcaccgtgttgtctggtctcgtagtggcttttgccatctttgatcggaagttggtgatcctgatcattatcctctgtggaatcgcttatacccgagctgatactggatgtgccatagatataagtcggcaagagttgaggtgtggcagcggagtatttatacacaatgatgtggaagcttggatggaccgatacaagtactaccctgaaacaccacaaggtctagctaagatcattcaaaaggctcacaaggaaggagtgtgcggtctacgatcagtttctagattggaacaccaaatgtgggaagcagtgaaggatgaactaaacactcttttgaaggaaaatggtgtggaccttagtattgtggttgagaaacaggaggggatgtacaaatcagcacctagacgcctgactgccaccactgagaaactggaaataggctggaaagcctgggggaagagcattctgttcgcaccagaactggccaacaacacttttgtgattgatggtccggagaccaaggagtgtccaacccagaaccgtgcctggaacagcttggaggtggaagattttggattcggcctcaccagcactcggatgttcttgagggtcagagaaagcaacacgactgaatgtgactcaaagatcatcgggacagccgtcaagaataacttggcgatccatagcgatctatcctactggattgaaagcaggtttaatgacacgtggaagctcgaaagggcggtcctaggtgaagtcaaatcatgcacgtggccggaaacacataccctgtggggtgacggggtccttgagagtgacctaataataccaatcacgctagcgggactgcgaagcaaccacaaccggaggcctgggtataaaacacaaagccagggtccatgggatgaaggtcgagtggagattgactttgattactgtccagggacaacggtcactctgagtgagagctgcgggcatcgtggacctgccacccgcaccactacagagagtggaaagctgataacggactggtgctgtaggagctgcaccttacctccattgcgctaccagacagacaatggttgttggtatggcatggagattaggccacagagacatgatgaaaaaactcttgtgcagtcacaggtgaatgcctacaacgctgacatgattgatccttttcagctgggccttctggtcgtgttcttggccacccaggaggtccttcgcaagaggtggacagccaagatcagcatgccagccatactgattgccctgctagttctagtgtttgggggcatcacttacactgatgtgttacgctatgtcattctggtgggggcggcctttgcagaatccaactcaggaggagatgtggtgcatctggcgctcatggcaaccttcaagatacaaccagtgttcatggtagcatcatttctcaaggcgagatggaccaaccaagaaaacattctgctgatgttggcagctgctttcttccaaatggcttactatgatgcccggcaaattttgctttgggaaatgcctgatgtattgaattcattggcagtggcttggatgatattgagagcgataacgttcaccacaacatctaatgtggtcgtcccgctgctggccttgttaacacctggattgagatgcctaaacctggatgtgtacaggatcctgctactgatggttggaataggcagtttgatcagggaaaaaagaagtgcagctgcaaaaaagaaaggagccagtctgctatgtttggctctagcctcaacaggattttttaaccccatgatccttgctgctggacttgtcgcatgtgatcccaatcgcaagcgggggtggcctgcaactgaagtgatgacagctgtcggcttaatgtttgccatcgttggagggcttgcagaactggacatagactccatggccattccaatgactatcgcagggctcatgtttgctgcttttgtgatctctggaaaatcgaccgacatgtggattgagaggacagcggacatctcctgggagggtgatgcggaaatcacaggttccagtgaaagagttgatgttcggcttgacgatgacgggaacttccagctcatgaatgatccaggagcaccttggaaaatatggatgctccgtatggcttgcctggcaatcagcgcgtacaccccttgggctattttgccttcagtagttggattttggataactctccaatacacaaagagaggaggtgtgctgtgggacactccctctccaaaggagtacaagagaggggacacgaccactggtgtctataggatcatgactcgtggattacttggtagttaccaagcaggagcaggcgtgatggttgaaggtgttttccacaccctctggcacacgacaaaaggagccgctctgatgagcggagaaggccgcctggatccatattggggcagcgtcaaggaggatcgactttgttatggtggaccctggaaactgcagcacaagtggaatgggcaagatgaggtgcaaatgattgtggtggaaccagggaagaatgtcaagaacgtccagactaagccgggggtgttcaaaacacctgaaggggagatcggggccgtgactctggatttccccactggaacatcaggctcgcccatagtggacaaaaacggtgatgtgattgggctttatggcaacggagtcataatgcccaatggctcatacataagcgcgatagtgcaaggtgaaaggatggatgagccggttcccgccggattcgaacctgagatgttgaggaaaaaacagatcaccgttttggatcttcaccctggtgctggtaaaacaaggaggattctgccacagatcatcaaagaggctataaacaggaggctgaggacggctgtgctggcgccaactagggttgtggccgctgagatggctgaagccctaagaggattgcctatccgataccaaacatctgcggtggccagagagcacaatggaaatgagatcgtcgacgtcatgtgccatgcaaccctcacccataggctgatgtctcctcatagggtgcctaattacaacctatttgtgatggacgaggcccacttcaccgacccagccagcatcgcggctagaggatacatttccacgagagttgagctgggggaggcagctgcaatattcatgactgccaccccaccaggtacctcagacccatttccagagtccaatgcaccaatatccgacttacagaccgaaatcccggaccgagcctggaactcagggtatgagtggattacagaatatatcgggaagacggtttggtttgtgcctagtgtgaagatgggaaatgagatagccctctgtctgcagcgcgctggcaaaaaagtcatccagctaaacagaaagtcgtacgagacagagtatccaaaatgcaagaacgatgattgggactttgtcgtcacaacagatatatctgagatgggagcaaactttaaggcaagcagggtgattgacagccggaagagtgtgaaaccgactatcatcacggaaggagagggaagagtgatcttgggggaaccatccgctgtgacggcagccagtgcagcccagagacgaggacgcattggtaggaatccatcacaagttggagatgagtactgctatggagggcacacgaatgaggatgactcgaactgtgctcactggactgaggcacgaatcatgctcgataacatcaacatgccaaacggattgattgctcaattctaccaaccagagcgcgagaaggtatacaccatggacggggaataccgacttagaggagaggagaggaaaaacttcctggaattgttgagaactgcagacttgccagtatggctagcttataaggtggcagcagctggggtgtcatatcatgaccggaggtggtgttttgatggccctaggacaaatacaatccttgaagacaacaatgaagtggaagtcatcacaaagcttggtgaaaggaagattctgaggccacgctggattgatgcaagggtgtactcagaccatcaggcgctgaaatcattcaaggacttcgcctcagggaagcgctctcaaataggttttatcgaggtccttggaaagatgcctgaacatttcatggggaagacatgggaagcactcgacaccatgtatgttgtagccactgcagagaaaggaggaagagctcacagaatggctttggaggagctaccagacgccctccaaacaatagctctgatcgctctgttgagtgtgatgaccatgggagtgttttttcttctcatgcagaggaagggcatcggaaagataggcctgggaggcgttgtcctgggagccgcaacctttttctgttggatggctgaagtaccaggaacgaagattgccggaatgctgctgctttccctccttctgatgatcgtgttgattcctgagccagagaagcaacgctcgcagacagacaaccagctagctgtgttcctgatttgcgtgttgacccttgtgggtgcggtggcagccaatgagatgggttggctggacaagaccaagagtgacataagcggtctgtttgggcaaagaattgaaaccaaggagaattttagcattggggagttccttttggacctgaggccggcaacggcttggtcactgtatgctgtgactacagcagttctcactcccttgctaaagcacttgatcacgtcagactacatcaacacctcattgacctcaataaatgttcaagctagtgcgctattcacgctcgcgcgaggcttcccttttgtcgatgttggagtatcggctctcctgctagcagccggatgctggggacaagtcactctcaccgtgacggtgacatcagcaacacttctgttctgccattatgcctacatggtacctggatggcaggctgaggcaatgcgctcagcccagcgacgaacagccgctggaatcatgaaaaacgctgtggtagacggcatcgtggccacggacgttccagagctagagcgtaccacacccatcatgcagaagaaggttggacaagttatgctgattttggtgtctcttgccgcattggtggtaaacccgtctgtgaagacagtgcgggaagccggaattctgattacggcagcagctgttaccctctgggagaacggagcaagctctgtgtggaacgcaacaaccgccataggactttgtcacatcatgcgcggaggctggttatcgtgtttatccataacatggactcttgtaaaaaacatggaaaaaccagggctgaagagaggtggggcaaaaggacgcaccttgggggaggtttggaaagaaagacttaaccagatgacgaaagaagaattcatcaggtaccgtaaagaagccatcactgaagttgaccgctcagcagcaaaacacgctaggaaggaaaggaatatcactggagggcatccagtttctagaggcacggcaaagctaagatggctggtcgagaggaggtttcttgaaccggtcggaaaagtgatcgaccttggatgtggaagaggcggctggtgttattacatggccacacaaaaaagagtccaagaagtcagagggtacacaaaaggtggtcccggacatgaagagccccagctagtgcagagctatggatggaacattgtcaccatgaagagtggggtggatgtgttctataggccttctgaatgttgtgacactctcctttgtgatatcggagagtcctcatcaagtgctgaagttgaagaacatagaacgctacgagtccttgaaatggtggaagactggttgcatcgagggccaaaggaattttgtgtgaaggtactgtgcccctacatgccaaaggtcatagaaaagatggagctgctccaacgccggtatggcgggggattggttaggaacccactctcacggaattccacacatgaaatgtattgggtgagtcgagcctcaggcaatgtggtgcactcagtgaacatgaccagccaggtactcttaggaaggatggagaagaagacctggaagggacctcagtacgaagaagacgtgaacttgggaagcggaacgagagcagtgggaaaacctctactcaactcagacaccagcaagataaagaacaggattgaacgacttaggcgtgagtacagctcgacatggcatcatgatgagaaccacccatatagaacctggaactaccacggtagctacgaagtgaagccaacaggctctgcaagctcactggtcaatggagtggtcaggctcctctcgaaaccatgggacaccatcacaaatgtcaccacaatggccatgacggacaccaccccttttggacaacagcgagtgttcaaagagaaggtggacacgaaagctccggaaccgccagaaggagtgaagtatgtgctcaatgaaaccaccaactggttgtgggcgttcctggcacgagaaaagcgtcccagaatgtgctcgcgagaggaatttataaggaaggtcaatagtaatgcagctctgggcgccatgtttgaggagcagaatcaatggaggagtgctagagaagcggttgaagatccaaaattctgggaaatggtggatgaagagcgtgaggcgcacttacgcggagaatgtcatacttgcatttacaacatgatgggaaagagggagaaaaaacccggagagtttgggaaagccaagggaagcagggccatctggtttatgtggctgggagctcgcttcctagagtttgaggctctgggctttcttaatgaggaccactggcttggaagaaagaactcggggggcggggtcgagggtctgggcctccagaaattaggctacatcctgcgtgaagttggcacccgacccggaggcagaatctacgctgatgacacagccggttgggacacccgcatcacaagagctgacctggagaatgaagccaaggttcttgagttgttggacggggagcaccggcgcctggccagggccatcattgagctcacctatcgccacaaagtagtgaaggtaatgcgcccggctgctgatggaagaaccgtcatggacgtcatctccagggaagaccagagaggaagtgggcaagttgtcacctacgctctaaacacctttaccaacctggctgtccaattggtgagaatgatggaaggagagggtgtgatcggcccagatgatgtggagaaactcacaaaggggaaagggcccaaggttagaacctggctgtctgagaatggggaggaaagactcagccgcatggctgtcagtggagatgactgtgtggtaaagcccttggatgatcgctttgccacctctctccactttctcaacgccatgtcaaaggtgcgcaaggacatccaagagtggaaaccatcaaccggatggtatgattggcagcaagttccattctgttcaaaccacttcactgaactgatcatgaaagatggaagaacactggtgactccatgccgagggcaggatgagttagtgggcagagctcgcatctccccaggggctggatggaatgttcgagacactgcttgcttagccaaatcttatgctcagatgtggttgctcctgtacttccacagaagagatctgcggttgatggccaacgccatctgctctgccgtacctgtaaactgggtccctactggaagaaccacatggtccatccacgctggaggagagtggatgacaacggaagacatgctggaggtctggaatcgtgtctggattgaggaaaatgaatggatggaggacaaaaccccagtggagaagtggagtgatgttccatactctggcaaacgagaggacatttggtgtggcagcctgattggcacaagagcccgggccacgtgggcagaaaacattcaagtggccatcaaccaagtcagatcaataattggagatgagaaatatgtggattacatgagttcattgaagagatatgaagacacaacattggttgaggatacagtattgtaaatactttgttaattgtaaataaatattgttattatgtgtagaagtttagctttataatagtgtttagtgtgtttagagttagaaaaattttagtgaggaagtcaggccggaaaattcccgccaccggaagttgagtagacggtgctgcctgcgactcaaccccaggaggactgggtgaacaaagctgcgaagtgatccatgtaagccctcagaaccgtctcggaaagaggaccccacatgttgtagcttcaaggcccaatgtcagaccacgccatggcgtgccactctgcggagagtgcagtctgcgacagtgccccaggaggactgggtgaacaaaggcgaatcaacgtcccacgcggccctagctctggcaatggtgttaaccagagtgaaaggactagaggttagaggagaccccgcgttctgaagtgcacggcccagcctggctgaagctgtaggtcaggggaaggactagaggttagtggagaccccgtgccgcaaaacaccacaacaacacagcatattgacacctgggatagactaggagatcttctgctctgcacaaccagccacacggcacagtgcgccgacaatggtggctggtggtgcgagaacacaggatct

SEQ ID NO: 32 - protein, 3436 aa, Artificial Sequence
  synthetic
MVTKLRRPVKRAVDMMRRAVPRAAGPRRVLTRVSNTVKRNAGALRALLAYLLYQTFSGRKVGSGARSALKRFNKNDIVKMLLAFRRTLTNIITTMQRRVKGKKRRGVQDVPLLVLLLVGAGAMAATLRTVGDLTWLNVSTTDVGKWIRVENRHGKGECFVTATDVGTWCSDSVGYECPQIAPAYDPEDLDCYCRNTSTYVTYGRCKNGRSGRSRSKRAITIAPHGEAGLRVGSTKHWTSRATPQRYLMRVEKWVLRHPLPALVLVVLGWMMGRSHGQRAMYIVLMLLVAPSYGNQCLDVQSRDFVQGVSGGTWVDVVLDHDNCITIVADGKPSFDIRLSKMSMSKFAEYKRYCLQATMSDVTSIVACPGAGDAHNDKSKNHEYICKAVNNDRGWGNGCVLFGKGSMETCGKFECKKKMAGKLVARENVESVVTVHVHGASATDTKGVDTASTAKATITPKASVATLNLNDFGSLEVDCSTDVGMDFGEIVVADMSGKWWIVNKDWFNELALPWSTASTTAEVWQARDRLVEFGWPHAAKQNIYDIGDQEGAVTAAIAQAPMAKWESDKVELISGILKCKVKLGNLKLKGTTYGVCSKAFRFLGTPADTGHGTVVLELQYTGTDGPCKIPISSVASLNDLTPVGRLVTVNPFVSVSTANAKVLIELEPPFGDSYIVVGRGEQQINHHWHKSGSSIGNAFTATYKGITKLTVLGEHAWDFNSLGGFGASLGKAVHTLFGGVFRVMFGGMGWLTKIFVGAVLVWLGLGAHDKTIATTMILVGSILMYMAVTVGALSEIGCSLDISRKEMKCGDGVFIFREAGMWKDGYAFHPSEPKSLAASVLKSWQSGVCGVRSTNRMEHAMWKQIENELNGILEENEAQLSVVVRESNGTFPRGERRMHVAEPLRYGWKTWGKTAISTVPLAKETFVVDGNDEGECPSQMRAWNSFQVEEFGTGLVKTKVFLDISTALTAQCDTKMLGAAIKGNRSVHGDPGLWMVSAEIDGTWQIIELTLAESRRCTWPDSHTVWGRNVQESELILPPSFGGPMTNMNKRKGYATQVGGPWNHVPLRVVFEECPGTTVSVEPNCTRRSDSVRSTTDSGKIITDWCCRSCTMPPLTYRTPDGCWYAMEIRPKNVKEESLIRSHVAAGVFKGIDDVSLGLLVMIIFLQEGLRRKLTATYIMWAALVVLIAGILGELTVRDVLRYLILVGTAFAESNNGGDLIHLALVAVFKIRPAFLFGFLFRSQWSPREGVLLASGALMLQIASECLHASAIMQVVDSLSMGWLMIRAIAVPGMTSKAMPLLCACIPAVTSLLAHSTRAGIITMAGMSLIAGSKGSSVKKHSPYMLALVVAGLGARPIGMLAMEAFSHLKGRRSWPAGEMMSAVGLTCALVGAISGASSQDFAGPLAAAALIIIAYAISGRSADVYLEKAGEISWSEDAKISGSSPRIDVCVTENGDFKLRHESEATWTRNCVLAACLVVAGVHPLGIPVAGLMWFGYVKSNKRGTVLWDIPSPQATSAPTVEDGCYRVMSRRLLGSTQLGVGIMLDSTFHTMWHITRGASIVSGEGRLDPYWADVKEDLVCYGGPWKIRNTWDGLSEVQLIAVAPKENPVNVQTMPGKFIVANGGEIGAVVLDYPPGTSGSPIVDQQGNVIGLYGNGVMINDQTYASAIAQAPAEVARTPTWFTDDMLRKGQLHVLDLHPGAGKTRKVLPEILKAAVEKRLRTLVLAPTRVVAKEMHEALTGLPVRYQTSAVAPNGSGGELIDVMCHATYTHRQLTPGRGVNYQLYIVDEAHFTDPASIAARGIIATRVRLGHAAAIFMTATPPGMSNPFPESNAHIEDEEREVPTKAWNAGYEWITDYGGKTVWFVPSIRMANTIAACLVRAGKTVIVLHSGSFNEEYQKTKSGNWDFVVTTDISEMGANFKASRVIDSRLSIKPMFSYAPSERVVIGSPRAVSPASAAQRRGRVGRDPRQLGDQYIYGGPVGEDSAEFVHWKEARILMDNVTVPGGLYPQFYEPEGGMCDAMDGAHRLTDAKREVFRDLMKKGELPVWLAYQVAQAGHAYTDRTWCYGGPADHQVYDDCGQTVDYRSLNGERRMLRPKWLDQRTYNDKTSLRLFTEFAEGRRRYSELMDVFGRMPQHMLDRTILAADTFKDVLTATPGSRVHRLALDNLPEATETMMVVGILSVSTLGVMLFLMSPKGMTRMTCGLVVIILATYFLWVSGMAGYQIAAMQLIAFILFVVLVPEPGSQRSVQDNTIAIILIVILSLAAIIAANEAGLLEKTKKDFAWKRESHVLVTPSPWNLDFSMDLRPATSWSLYVVMATMLGPVLEHAIVTNYASVSLTAITNQAGILLSMDKGTPFWNLDWSVVLLCVGSWSGINGTTLMVASTMTVLHFAMILPGIRAKAAREAQNRTAAGVSKNPLIDGLNTINIQPLPEMDPMYERKMGLWMLIAVAGAAVVFDKRMLHYTEFGVLGSAAVSPLIEGYASAVWNTSVAASVCNLMRGHYMAGIPMAYSLIRNLSMKGVPRRGLQATHTLGMVWKHKLNAMDKAAFNAYRKDGVTEVDREPAREAMKKGDLVSGWAVSRGSAKLRWMHERGYIPLQGVVIDLGCGRGGWSYYAAAQRRVTAVKGLTKGGPGHEEPINVQSYGWNLVTFRSGVDVFHTEVQPADTLLCDIGESSADPAVEKARTVQVLVNFERWIRESRCEHFCCKVLGPYSPEVMERLDRLTKTYGGAVIRNPLSRNSTHEMYWVSGAKGNPVNAITATSRVLIERMYRRLGKSYWEEDVNLGTGTRAVSCAAEKPDLAKIGRRIELLKKEYKASWFEDPEHPYKTWTYHGSYETKTTGSSSSMINGVVKEITHPWDTNPRVTTVCMTDTTPFGQQRVFKEKVDTKAREPSQGTREIMRIVSKWLTLYIGRSKRPRLCTADEFIAKVNADAALGTMFDSQGNWANAKEAVRDPRFWQLVAKERELHLRGQCATCVYNMMGKREKKLTEFGKSKGSRAIWFMWLGARFLEFESLGFLNEDHWLSRENSGGGVEGIGLQYLGYVLKEMALIPGGKMYADDTAGWDTRITNADLEDEMDILGLMDPHHKKLAKNLMELAYNNKVVRVMRPGKGGKTLMDIISRKDQRGSGQVVTYPLNTWTNLKVQLIRMAESEGVLDPKEIDGITVTTRNNLEKWLTSQGAERLKRIAASGDDVVVKPVDERFANALTYLNDMAKIRKDISEWKPSAGWFHWEEVPFCSHHFHQLVLKDGRTLVVPCRDQDELIGRARVSPGAGWTIRETAGLSKAYAQMWLLMHFHRRDLRMAGFAICSAVPSDWVPTGRTSWSLHAKGEWMTTEDMLAVWNRVWIEDNPHMSNKTLVGSWQDIPYQRKSLDIHCGSMIGQRSRSTWAANIRISIGHVRRLIGTTEKYLDYMQEQERFKIAEPTRLGNVI

SEQ ID NO: 33 - DNA, 11815 bp, Artificial Sequence
  synthetic
gggtcggcatggcatctccacctcctcgcggtccgacctgggcatccgaaggaggacgtcgtccactcggatggctaagggagagccacttttctctcgattctctatcggaatctagggagctcggatccagacatgataagatacattgatgagtttggacaaaccacaactagaatgcagtgaaaaaaatgctttatttgtgaaatttgtgatgctattgctttatttgtaaccattataagctgcaataaacaagttaacaacaacaattgctcgagggggggcccggtaccttgaagctgtccctgatggtcgtcatctacctgcctggacagcatggcctgcaacgcgggcatcccgatgccgccggaagcgagaagaatcataatggggaaggccatccagcctcgcgtcggcgcttaaggatcatgatgataaacaatgtatggtgctaatgttgcttcaacaacaattctgttgaactgtgttttcatgtttgccaacaagcacctttatactcggtggcctccccaccaccaacttttttgcactgcaaaaaaacacgcttttgcacgcgggcccatacatagtacaaactctacgtttcgtagactattttacataaatagtctacaccgttgtatacgctccaaatacactaccacacattgaacctttttgcagtgcaaaaaagtacgtgtcggcagtcacgtaggccggccttatcgggtcgcgtcctgtcacgtacgaatcacattatcggaccggacgagtgttgtcttatcgtgacaggacgccagcttcctgtgttgctaaccgcagccggacgcaactccttatcggaacaggacgcgcctccatatcagccgcgcgttatctcatgcgcgtgaccggacacgaggcgcccgtcccgcttatcgcgcctataaatacagcccgcaacgatctggtaaacagtatattttgcgtgtgcgtttcaaaacacagattgtattgaaagtacgtaagagtataacacgttggaataaagttttggatcaagaggaaaatcatggttacaaaactcaggaggcccgttaaacgggccgtcgatatgatgaggcgcgcggtaccccgcgccgcaggaccccggcgggtcctaactagggtatcaaataccgtgaagcgtaacgcaggcgctcttagagctcttctggcttatctgctgtaccagacattctctgggcggaaagttggtagtggtgctcggagcgcccttaagcgcttcaacaaaaatgacattgtgaaaatgttgctggcgttcagacggacattgacaaacatcatcacaaccatgcagcgtcgtgtgaaaggaaagaaacgtcgtggcgttcaagatgtgccgctattggtcttgctgctcgttggagcaggagcgatggctgccactttacgcaccgttggagacttgacatggctaaatgtgtcaaccactgatgttggaaagtggatacgtgtggagaataggcacggcaaaggagagtgtttcgtcacggccactgacgttggaacatggtgctcagactctgtgggatatgaatgtcctcaaattgcaccggcgtatgaccctgaagacttggattgctactgccgaaacacctcaacctacgttacttatggaaggtgtaaaaatgggcgcagtggacgatctcgcagcaagagagcaatcacgatagccccgcacggcgaagcaggattgcgtgttggaagcaccaagcattggacttctagagcaactccacaacggtatctaatgcgcgttgagaaatgggtgctgcggcatcctctacctgctctcgtgttggtggtactgggatggatgatgggtcgttctcacggccagagggccatgtatatagtgctgatgctgcttgtggctccgtcatatggtaaccaatgcctggatgtgcagtcacgtgatttcgtgcaaggggttagtggtggcacctgggtagatgttgttttggatcatgacaattgcataaccattgttgctgacgggaaaccatcttttgatattcgtttgtcgaaaatgagcatgtctaaattcgcagagtacaaacggtattgcctccaggccacgatgagtgatgtcactagcatagtggcgtgtccaggggctggggatgctcataatgacaagagcaaaaaccacgagtacatttgcaaagctgttaacaatgaccgcggatggggcaatgggtgtgtcctttttggcaaaggatcaatggaaacttgtggtaagtttgaatgtaagaagaaaatggctggcaagttagtggcacgtgagaacgtggaatcagtggtcactgtgcatgtacatggtgcctccgcaactgacacaaaaggagttgacaccgcctctacagccaaagcgactatcacgccaaaagcttctgtggctactctaaatttaaacgactttggtagcctggaggtggattgttcaactgatgttggcatggactttggagagattgtggtggccgacatgtcaggaaagtggtggatcgtgaacaaggattggttcaatgaacttgctttgccgtggtccacggctagcaccactgctgaagtttggcaggcacgagacagacttgttgagtttggatggccacatgcggccaagcagaacatctatgacattggggaccaagaaggagctgtgacggctgccatagcccaggcacccatggcgaaatgggagtctgacaaggtcgagctaatctctgggattctcaagtgcaaggtgaaacttggcaacctaaagctgaaggggacaacttatggcgtctgttcaaaggccttcagattccttgggactcccgcagacacgggccatggtactgtggtactggaactgcagtacacaggcacggatggaccctgcaagatacccatttcatcagtagcttcattgaatgacctaacgccagtgggcaggttagttaccgtcaacccctttgtctccgtgtcaacggccaatgctaaagtcctgattgagttggaaccaccctttggagattcgtacatagtggtgggaagaggagagcaacagatcaaccatcactggcacaagtctggtagctcgataggaaatgcctttacggccacttacaagggcatcacaaaattgacagtgcttggagaacatgcctgggattttaattcactaggtgggtttggagcaagccttgggaaggcggtccatacactgtttggaggtgtattccgggtgatgttcggaggcatgggatggttaaccaagatctttgtgggtgctgtcctagtctggctaggattaggagctcatgacaagacgatcgccaccaccatgatcctggtaggatccatactgatgtacatggcagtgaccgtgggtgccctatcggaaataggatgcagtctggacattagccgaaaagaaatgaagtgtggggacggagtcttcatcttcagagaggcaggcatgtggaaggatgggtatgcgttccacccttccgaacccaaatctctggccgcgtcagttctcaagagttggcagtctggagtgtgcggcgtgcgctccacgaacagaatggaacatgccatgtggaaacagattgaaaatgaattgaacggcattctagaagagaatgaggcgcaactcagcgtggttgtgcgagagtctaacgggaccttcccgagaggagagcgccgcatgcacgtggccgaacctctgcgctatggatggaagacctggggaaagaccgcaatttcgacggtgccgctcgctaaagaaacgtttgtggtagatggcaatgatgaaggagaatgtccctctcaaatgcgtgcttggaattccttccaagttgaagagttcggaactgggctggtgaaaaccaaagtgttcttggacatatccactgctctcaccgcccaatgtgacaccaaaatgctgggcgctgccataaaggggaataggtctgttcatggagatccaggtctctggatggtctcagctgaaatcgatgggacatggcagataatagagctcacattggcagagagcaggcgttgcacatggccagactctcacaccgtgtggggtaggaatgtccaggagagtgagttgatactgccaccgtctttcggaggaccgatgaccaacatgaacaagcgtaaaggctacgcgacccaagtgggaggaccatggaaccatgttccactacgagtagtttttgaagagtgtccgggaaccactgtatctgttgaaccaaactgcaccaggagatcggattcagtgcgatccacaactgatagcggcaagattataaccgactggtgttgtcgttcctgtacaatgcctcccctaacgtaccgaacccccgatggatgctggtatgcaatggaaatcaggcccaagaatgttaaagaggagagtctgatccgttcgcatgtggcggcaggtgtgtttaaaggcattgacgacgtgtcactggggctgttagtaatgataattttcctgcaggaaggtttgagaagaaagttaactgcaacgtatatcatgtgggctgctcttgtggtcctcattgcaggaatcctaggggaactcacagtgagggatgtgctcaggtatctcatcctagtcggcactgcattcgctgagagtaataatggaggagatttaatacatctggccctagtggcggtcttcaagattaggccggcattcttatttggattcttgttcaggagtcagtggtcccccagagaaggtgtgttgctggcatctggagcgctgatgctgcagattgcaagtgagtgcttgcacgcatcggcgattatgcaggttgtcgattccttgagcatggggtggttgatgatcagagccattgctgtacctggtatgacctcaaaagccatgccactgctgtgtgcctgcattcctgcagttacgagcctactggcccactcaaccagagccggtataatcaccatggccggcatgtcgcttattgcaggaagtaagggatcatcagttaaaaaacacagtccatacatgcttgccctcgtggtggcaggcctcggagcccgtcccataggaatgttggcgatggaagccttctctcacctgaagggccggagatcatggccggctggtgagatgatgtcagccgttgggctgacatgtgcgctagtgggagctatcagtggcgcatcatctcaggacttcgccggacctctagcagcagcggctctaattattattgcatatgccattagtggacgctcagctgatgtataccttgagaaagccggtgagatatcctggagtgaggacgctaaaatatccggatcaagcccgcgcattgatgtgtgcgttaccgaaaatggagatttcaaattgcgtcatgagagtgaagcaacctggacccggaattgtgtcttggctgcttgcttagtcgtagccggagtgcacccactggggattccagtagcagggttgatgtggtttggatatgtgaaatcaaacaagcgggggactgtgttgtgggacattccctcaccacaggcaacatcagctccaacggtggaagatggatgctaccgcgttatgtcacgtagactgcttggcagcactcagcttggtgttgggatcatgctagactctacatttcacacaatgtggcacataacccgaggagcatctattgttagtggtgaagggcgtcttgacccatattgggctgacgttaaggaagacctggtctgttacggagggccatggaaaatccgcaacacatgggatggactctcagaagttcagctgatagcggtggccccaaaagagaatcccgtgaacgtccaaacaatgccaggaaagttcattgtggcgaatggaggtgagataggagccgttgtgctcgactatcctcctggaacttctggttcacccatcgtggatcagcagggtaatgtcataggactgtatggcaacggggttatgatcaatgaccaaacgtatgcgagtgccattgcgcaagctccagctgaagttgcgcgcaccccaacctggttcactgatgatatgttgcgaaagggacaattgcatgtgctagacttgcaccctggagcgggaaaaacccgcaaggtcctgcctgagattctcaaagcagcggtggagaaacggctacgcacgttggtcctggccccaaccagagttgtggcaaaggaaatgcatgaagcattgaccgggctgccggtacgctaccagacatcagcagtggcaccaaatggttctggaggagaattgattgatgtcatgtgccatgcaacatacacacaccgccagctgacaccgggacggggggtcaactaccagttatacatagtggatgaggcacattttacagatcccgcttccatcgcagctcgcggcatcattgcgactagggtgcgattgggacatgccgcagcaatcttcatgacggccacacccccgggaatgtcaaacccattcccggagtctaatgctcacattgaagacgaagagcgggaggtacccaccaaagcttggaacgctggatatgagtggataacagactatgggggaaaaaccgtgtggttcgtgccttccatccggatggcgaacaccatagctgcatgcttggtacgagcaggcaagacagtcattgtactgcacagtggctctttcaatgaagaatatcaaaaaaccaagtctggcaattgggatttcgttgtgacgaccgacatctcagaaatgggggccaatttcaaagcctctagggtcatagactctagactgtccataaaaccgatgttttcctacgctcccagtgagcgagtggttattggctcacctagagcggtttctccagccagcgcagcacagcgccgagggagagtcgggagagaccctcgtcaactgggcgaccagtatatctatggtggaccagtaggagaagactcggccgagttcgttcattggaaggaagcaaggatcctcatggataatgtaactgtccctgggggcttgtatccacaattctacgaaccagagggtggaatgtgtgacgccatggatggagctcaccgactgaccgatgctaagagagaagtgttccgagacctcatgaagaaaggggaacttcctgtatggttagcataccaggtggcccaggctgggcatgcgtacactgacagaacttggtgctatggggggccggcggatcatcaagtgtatgatgattgcggccaaaccgtggattacaggtcccttaatggagagaggcgtatgctacgtcccaagtggcttgatcagcgcacctacaacgacaaaacatccttaaggctcttcacggaatttgcagagggacgccgccgatattcggaactaatggacgtgtttggaagaatgccccaacacatgttggacaggaccatcttggctgcagacacgtttaaagatgtcctgacagcaacaccgggatctcgtgtgcaccgtttagcactggacaatttacccgaagctacagaaactatgatggtagtgggaatcctgagtgtctcgaccctaggcgttatgctatttctgatgtcacccaagggcatgacccggatgacctgcggacttgtggtgatcatcctggcgacgtattttctatgggtgtcaggaatggccggctaccagatagcagcaatgcaactcatcgcgttcattctgtttgtggtcttggtgccagagccagggtcacagagatcagtgcaagacaacaccatagcgataattctcatagtcatcctgtcgttggctgccatcatagccgccaatgaagcaggattgctagagaagaccaaaaaggatttcgcgtggaagagggagagtcatgtgctggtgactccgagtccgtggaacctggatttctcaatggatttgaggccagccaccagctggtcattgtatgtggtgatggccaccatgttagggccagtactggaacacgccattgtcaccaattatgctagcgtctcacttactgccatcacaaaccaggcaggaatactgctgtcaatggataagggcactcctttctggaatcttgactggagtgttgtcctgttgtgcgtgggcagctggtcggggatcaatggcactacactaatggttgcttccacaatgacagttttgcattttgccatgatactacctggcattcgtgccaaagcggcgagagaagcacagaatcgaacagcagctggggtgtcaaagaaccctcttattgatgggttaaacaccataaacatccagccgttgccggaaatggaccccatgtacgaaaggaaaatggggctatggatgctaatcgctgttgccggagccgcggtggtttttgacaagagaatgctccattacaccgagttcggagtattgggttcagctgctgtgagtcctctcattgaaggatacgcgtctgctgtttggaacacttccgtagcagccagtgtgtgcaacctaatgcgaggccattacatggcgggaatcccaatggcatactctctgatcagaaatctatccatgaaaggagttcctaggaggggattacaggccacccatacccttggtatggtttggaaacacaaattaaacgccatggacaaggcggcctttaacgcataccggaaggatggagtgacagaagtggatagggagccagcacgtgaagctatgaagaaaggagatttggtgagcggatgggcggtctctcgagggtcagccaagctgcgatggatgcacgagcgtggatacattcccctacaaggagttgtcattgacctcggatgtggaagaggggggtggagttactacgctgctgcacaacgccgggtgaccgctgtcaaagggctcacgaaaggcggaccagggcatgaggagccaatcaacgtccagtcatatggatggaacttagtgacgttccgtagtggagtggatgtctttcacaccgaagtccagccggctgacaccctgttgtgcgacataggagagtcttctgctgaccccgctgtcgaaaaagcgcgcacagtacaagtgttggtgaactttgaaagatggattagagagtcgcggtgtgagcatttttgttgcaaggtgcttggtccctactctcccgaagtgatggagcgcttagatcgtttaacaaagacatatggaggagcggtaattcgcaacccactatccaggaactccacgcatgagatgtactgggtgtcaggagctaagggtaatccagtcaatgctataacagccacctcacgtgtgctaatcgaacgcatgtacagaagacttggcaagagttactgggaagaagatgtgaatcttggtactgggacccgtgcagtttcatgtgccgcggagaagccagatctagcaaaaatcggaaggcgcattgagttgctgaagaaggagtataaagcatcatggttcgaggatccagagcatccctacaagacatggacataccatggttcctacgaaaccaagaccacaggcagctcgtctagtatgattaatggcgttgtcaaggagatcactcacccttgggataccaacccaagggttacaaccgtctgtatgaccgacaccactccttttggacagcagagagtattcaaggaaaaggtagataccaaggcacgtgagccatctcaagggacgcgggagatcatgagaatagtgagcaagtggctcacactatatattggtcggagcaagcgccctaggctgtgcacagcggatgaattcatagccaaagttaatgctgatgccgctctcggcacgatgttcgactcgcagggaaactgggcgaacgccaaagaagctgtgcgcgacccacggttttggcagttggtggccaaagagagggaacttcacctgcgtggacagtgtgccacgtgtgtttacaacatgatggggaagcgagagaaaaagctgacagagtttgggaagtcgaaggggagccgagcaatttggtttatgtggctaggagctaggttcttggagtttgaaagtttaggcttcctaaacgaggatcattggttgtcacgtgaaaactcaggaggtggagttgagggcattggattgcaataccttgggtatgtgttgaaagaaatggcactaattcccgggggcaagatgtacgccgatgacaccgctgggtgggacaccagaattactaacgctgaccttgaggatgagatggacatattgggacttatggacccgcatcacaaaaaactggcaaaaaatctgatggagttggcgtacaacaacaaggtggtcagagtgatgcgccctggtaaagggggaaaaacactaatggacatcattagccgcaaggaccagcggggaagtggacaagtggtcacctacccactcaacacgtggacgaatctcaaggtccaattgatccgtatggcagagtcagagggagtgttggaccccaaggagatcgatggaatcactgtcacgactcggaataacctggaaaaatggctcactagccaaggggctgagcgtctaaagcgcattgcagctagcggtgacgacgttgtggtaaaaccagtggatgagagattcgccaatgctctcacctatctaaacgacatggccaaaattaggaaggacatcagtgagtggaaaccatccgcggggtggttccactgggaagaagtgccattctgctcacaccattttcaccagttggtcctcaaggatgggcgcaccttagtggtcccatgccgtgaccaggatgaactaattggaagggcaagagtgtcacctggtgctggatggactatcagagaaactgcaggtctaagcaaggcctatgcccagatgtggcttctaatgcacttccaccggagggacctcagaatggcaggtttcgccatttgtagtgctgtccccagtgattgggtgcccacgggaaggacatcgtggtcactgcacgctaaaggggagtggatgaccactgaagacatgttagcagtttggaacagagtgtggattgaagacaatccccacatgtctaacaagactttagtgggatcatggcaagacatcccgtaccagaggaaatccctggacatccactgtggctcaatgatagggcagcggtctaggtcaacatgggctgctaacatacgaattagcattggacacgtgcgccgattgattggaaccacggaaaagtacttggattacatgcaggagcaggagcggttcaagattgctgaaccaacccgtctgggcaatgtgatctaaggatctacgaacgagaataagtagaagaacggaacgacagagtcaggcctcaaatgagccagcattaatgagagtaagtgctgctgcctgtgcctctccttaacacgtggtagcgccactcgtgtttcgttacctaatagcgctagagtcagacccaagtaggccagggctatggttgtaagccctgctgtctgtggcagccatccagtggtaatgcgtcgcaccactaaggattaatagacgtatattgggagggactggtgaggagcagcaagctcgagctgcatcacccactggtactatcggttagaggaaaccccctccaaaatgtagagcatcatatcgacacctgggaaagaccggagatacctcttgcttcacagcactcaatccacaaggcacagatcgccgaataattgtggattggggattgagaaacatcaagtatct

SEQ ID NO: 34 - DNA, 11797 bp, Artificial Sequence
  synthetic
gggtcggcatggcatctccacctcctcgcggtccgacctgggcatccgaaggaggacgtcgtccactcggatggctaagggagagccacttttctctcgattctctatcggaatctagggagctcggatccagacatgataagatacattgatgagtttggacaaaccacaactagaatgcagtgaaaaaaatgctttatttgtgaaatttgtgatgctattgctttatttgtaaccattataagctgcaataaacaagttaacaacaacaattgctcgagggggggcccggtaccttgaagctgtccctgatggtcgtcatctacctgcctggacagcatggcctgcaacgcgggcatcccgatgccgccggaagcgagaagaatcataatggggaaggccatccagcctcgcgtcggcgcttaaggatcatgatgataaacaatgtatggtgctaatgttgcttcaacaacaattctgttgaactgtgttttcatgtttgccaacaagcacctttatactcggtggcctccccaccaccaacttttttgcactgcaaaaaaacacgcttttgcacgcgggcccatacatagtacaaactctacgtttcgtagactattttacataaatagtctacaccgttgtatacgctccaaatacactaccacacattgaacctttttgcagtgcaaaaaagtacgtgtcggcagtcacgtaggccggccttatcgggtcgcgtcctgtcacgtacgaatcacattatcggaccggacgagtgttgtcttatcgtgacaggacgccagcttcctgtgttgctaaccgcagccggacgcaactccttatcggaacaggacgcgcctccatatcagccgcgcgttatctcatgcgcgtgaccggacacgaggcgcccgtcccgcttatcgcgcctataaatacagcccgcaacgatctggtaaaccgtaaaatccgtacgcttgttttggcacactagtttgtgacataaggcttttgtcgcgcgtattgggtttaactttttttcgagaaatcgagaggtaagaagaattgaaagacattatgtctaacccttccgtcaggaggggtgtcaatgtgatggcggctcagaaaaaacgagtcgcccaaaaaataaaatcaatgaggaagggaacccagagcatcagcaatggagttaggggtttcatcctctttttcatatcccaaatcttctgggcacgtaagatcacgcccagagtgaaaggattgtggaaaaaactagacaaatttcaggcaatgaaggttttgaaagggctaaggaacatcatcaatggattgatgagatcggtcgctgggaaaaagaaacgccgtggagggaataccgtgccattcttagtgatgatgatggtagcaacaacatgggccttaactctcaggaagattgacaacactattgttctgaatgtcacccaaaatgacatagggaaaacatttcctgtaaggggcggtaattgttccattaacatcaatgatgctggatactggtgtcacaatacagtcgaatatgattgtgtcaccatagctggtacggaagagcctgacgacattgattgctggtgtgttggcattgaaggagtgagagtgacttacgggaaatgttcaaagtcatcaccgcacgggaggagatctcgtagagcagcagtcattcccgcgcatggtgggcagggactatcaacccataaagagacatggctatccactgtagcaggggaaaggcaaatccaacgtatagaaagatggatcattcgcaatcctctttatgccgctgcaatggtgactgtggcgtattttctgggaagtgacaccaaacagaaagtgctgttagctgtgttaatgttggcaattggacctgcttacggctctcactgcattggaattgaacggcgtgactttgttcatggagttcagggaagcacatgggtaaatctagtgctggaccagggatcttgcgtgaccatggtgactgaaaacaagccaagtgtggatgtgtggctcaaggaaatctctttgagtcaacccaccttggttaggagatatagccacacagcaaaggtccataaaacagaaatcaaagctgcttgtcccacaatgggagaggccaaacttgatactgaacacaatccgtcgtatgaatgcaagcgcacttattcggatagaggttggggaaacggttgtggtctgttcggaaagggtagcatcattgcatgcgccgagttttcctcaacgggccatatggatgtttatgaaattgacatgaccaagattgagtacatcgtgaactcgcagattcatggaactgtgctcgttgagaacaattcccagcatgcagtagagtcaaagttccagccaacaacaggaggagctgaagtcacacatgcagggtatggcacacttggcttggactgtcatgtacaaaccatgatggatctgaacaacttctatctggctgtcatgggatccgatgcatggctagtgcacaagcaatgggtggaagatttgacattaccctggatggcaggtgaaactggacactggaaagaaaagaaatatctagttgaatttggtgaaccacatgccacgaagatggaagcccttgttttaggttcccaggagggggctttgaggactgcccttgctggagctatggtcgtggtgtactcccaaaatgacaaaaaattcactctgaaggggggtcatgtgagttgtagagcaagattgactgacctgacattgaaaggaacatcatatccaatgtgcaagggctccctcaagttcacaaagactccagttgacaccggacatggaacagcagtgatgcatgtgcaagtgacgaaaggggcaccatgcagaataggagtccaaatggctgacaactcaaatggaggaaagtcgttgggaagcatgattacatcaaacccaatagtctccactgatggtgaggagactctggttgaagtttctcccccatatggagaaagttacatcatagtgggatcaggcgatggcaagttggtttaccattggcacaagactggaagcactattgggagcctgttctcagaaaccatgaaaggagctaagagattggcaatcctaggtgatgacgcatgggacttctcctcaacgggaggggtcttagcctcagttgggaaaatgctgcatactgtgtttggacaagctttccatgcaatctttggagggttgagttggatttcaaaaataattctaggttgtgttatgttgtggataggtgtgaactcccgcaatggcacattgagtgtcaccttgttgactgttggcggcattctgttgttcatgacacttggagttaacgctgagtacggttgctcattggacttccaaaggaaagaactgaagtgcggcgatggagttttcgtgttcaatgatgccaatgattggttgaccaagtacagatatcatcctgaagacccacgaacattggcttctctggtcaaggcttcatataaggccggacggtgtgggcttggatcagttgacaacatggaacataagatgtgggtgtccctggaaaatgagttgaatgccatctttgaggaaaaccaagaaaatatctcagtggtagtgaaggagagtaatggaatataccccaaaggaaattatccattcactggcactccagaaaagctgaaatatggatggaaaacatgggggaagaaattggtatttgccccggttttgagtaacaacacctttgtaatagatggaactcccgatgattgtccttacagcaacagagtttggaattcatttgagattgatgagttcggagcaggtttgactcataccagggtgtttttgaaacaaagactggaaagaaaagaagagtgtgacaatgcacttttaggagctgcagccaaaggggacgtggcagtccatggggatcccaacttctggatggcctcaaacaaaactggagaagtgtggcagatcaatgaattaatgtcactaaacctcaagcactgcacatggcccttgtctcatacgttgcatggcaatggagttctggaatcagacatgttcgttccgaaaagcattggaggaccggttagtcaccacaacttcattaaaggctacaaatctcaggtaaatggaccttgggcatcagtgcctctagaaatgcatcggagagagtgccctgacacagtggttcaaatagatcagaactgcagcgggagaggcaagtccacacggagcactacaaaggaagggaaaataatccgggattggtgttgtcgaaactgcacgctgccccctgttagctttgatggtcctgatggatgctggtatgctatggagattagaccgcagaagatgaatgaaaaacatttggtcacttcatgggtaagtgccggtgacgggatggaaaatggtaacattggattggtggctctctttgtgtgctttgacatgttcttgaagaacaagaacacccgaaagattagcttggttggagccttgtgtctattgggcgcaatgatccttgggaatgttggatttgttgatctaataaaattcatgattgtggttggtgaacatttccgctccttcaaccatggaggtgacgtctcctacttggtcctgaccgctgtctttgacatcaggccagccctgctctgcggctttgtgctgcgcaagaaatggagtcctagtgagagagtagtcatggccattggaatgatgctcctgcaaacggtgtgtggggattggactcagacatcttggtgggaatggctggatgctgttggattggggctcttgatcctcaatgcagtagctttacaaagatggaaaccggccattttggtcttgctgacaatgttgactccgctgaatatgcgagtaattcaaggtgctgcagggggagtgtgtggcgttatggtggccatgtctttgtggaaaacagaaggaagaagtctccgtaagagttacctgccagtcattggctatgttgcttcggcttttggatgggggtattcatggatcatggcagtgtacatcatgtgggcaacccatgtgtcaaggagatcttggcctgtaggagagctggcagcagcaattggacttttgggagctgcaatgggaatggcatccacaaaggatggagccatggtcatgccaatagctgtgctcggattaatcatggtgatcataggaatgacaggcaaatgcgatggaatggagattcgcaaagttgggtgtgtctcgtgggaagactccgctgagatcagtggttcaagctccaggtatgacgtggctcttagtgatggcggagaattccagctgttagagaattcgcggcccccctggaatcacatcattttcctcaccctgggaatgctggcgtcagcagtgcatccaatagtactgggtgtggtcatacttgcctgggggtggtttgcaggcaaaagccagcgcagtggagttttgtgggacgtgcctgttgctccaaaagttgaggaccatggaccccttgaggatggaatttacaccattttccagaatggattgtttgggagctcccaggctggagtaggagtggctcagggaggcgtgtttcacactatgtggcacgttactcgtggaggaatcctgctgcacaaaggtaaaagactcacccctggttgggctagtgtgaaaagtgacctcatttcgtatggaggtaaatggagacttgatggaagttgggatggagtcgaggaagttcagttgattgctgtccctcccaggaaaaatcctatcaatgttcaaactaagcccagcattttcaaattaaagagtggagaggagatgggagccatagctttggattaccctagtggaacttcaggatcacccattgtcaacagagctggagtcgttgtggggttgtatggaaatggaattgtgctcaatcagggtggttatgtgtcagctattagccaagcagctgtggaagaggtcagtagagatgagctacccggaattgaaggctacctgagaaaggggcaactcaccgttctggattttcacccaggggcaggaaagacacgtaacttcctgccccaaatcttgaaggcatgcaggacccgcaagttgcgaacactagtgctggccccaaccagagtggttctgagcgaaatgaaggaagctctgaatgatcacgatgtcaagtaccacacacaagctttctcatctgccagttcaggacgtgaactgattgacgctatgtgccatgcaacattggcatatagactattggaaagcactagggtgataaactgggaggttgtgataatggatgaggctcactacatggatccagccagcattgctgtgaggggttgggctgcccatagagctagagctcatgaatgtgcaacaatattcatgtcagcgactcccccagggactgcaaatgaatttcctgaatcaaatggaggcattgaggacatccgcaaggacatccccagtgaggcttggaacaaaggtcatgagtggatcctagaggatagaaggccaacggtgtggttcctgccctctataaggagcgcaaataacattgctgcatgtttgaggaaagccaacagaacggttgttgtgttaaacagacagacctttgaaagtgtgtaccccactatcaagacaaagaaaccggacttcatcctagccacagacattgctgagatgggggcaaatcttcatgtggaaagggtaattgactgccgaactgctttcaagccagtgctcagtgaggatcaggaacgggtaacactgaaagggccaatgagaatatcagcttctgcggcagctcagcgaagaggccgtgtggggagagatccatccagagagtctgacacatattactatggagaggacacctcagaggacaatgaccatttggtgtgctggactgaggcgtctatgattctggataacatggaaattaaagggggaatggtggctccgctgtacagcgtggaagccacaaagaccaaaatgacgccaggtgagtgtaggctaagagatgatcaaaggaaaacttttagagcattaataaagaaacatgagctgcctgtgtgggtctcatggaaggtggccaaagcaggaatcactccagatgataggaagtggtgttttgatggagaggaggacaacaccgtgcttaatgacatgggggagaaggtcatgggaagaagcccaggaggtgcaaagaaagctttgtgccctaggtggtcagacgcaaggctgactagtgacaatgcttccctcatgaacttcctggcatttgccgaggggaggagatcatacatgaggatcgttgacgctctcatcatggtgccccctatgctgaaagaaaaggtggtggatgcagcggacaccttagcactactactgcgttccgaggagggcagcagggcctacaaacttgctcaggagagcgctccagaagcgatcacaacactcatcatggtaaccttcctggttctgctatcagcaggactggttctgatgctcatgtggccaaaagggattagcaagatgtcattgggcatgctcaccatgagcgttgcgggataccttcttttggaaggagggctcacccaagtgcaggttgcaggaatattgctggtgtttttcatcttgatggtggttctaatccctgatgatggctcccagaggtcaatcaacgacaacaagctggcttacatgatgacaggaattatccttcttgttggagctgttgctgctaatgagatgggatggcttgaaaaaacgaaacaggatttgtttgggaaaagggaagaaatgccgggatggaactgggatttgggacttgacctaagacctggagcagcctggaccacttatgtggctctggcgactgtccttggcccagtgatagaccattggatacaagtggaatatggaagcgctagtttgactggcatagccaattcagcaggcatttccgcatttctggacaagggggttcctttcatgaaggtcaacatggcagtggtggttctgtttgtgagcgcatggaatagctattccatgctggccatcatggagggttgcctgatggcaggcattcatttttgcctgttaatccctgggctgaaggcaagagcaatgaagaaggcccaaaagaggatctatcatggtctatctaagaatccagtagttgatggcacacccactgtggatattgaagaagctgaagaaactccagtactgtatgagaagaaagtggctttggcactgctgggagttgtggctgcgctcaatggaattgtggtcagaacacctttctccatggctgaatcaattgtgctggggagtgccttggtgggtccttttattgagggtaacacgtctccactttggaacgcccctatcgcggttgcgttcgctggtctaatgcggggacattatagcagcatgataggattggcctacaatttttggatattgcaaaaccccaaaagaggaggtggtgagaccatgacccttggccaggtgtggaaaaagagactgaacatgcttgacaagaaggagtttgcaaaatacaagatttcagacattcatgaggtggaccgtaggcaagcacgtaccattctggacgcaggcatcaccaacgttggagtcagcgtgtcaagaggaacatccaagctgaagtggctgacagacagagggtactttaagccagaaggtagggttgtggatctcgggtgtggccgtggaggttggtcatacttggctgctgcagcaagagaaaccctggaagtgaaagcttacactctaggtgtgtcagggcatgagcgaccaattcaaatccaaagcctgggatggaatgttatcaagtttaaggacagagttgatgtgcacagacttccaatcgcccaatgtgacacagtgatgtgcgacattggagagtcttccagctcttgggaacaggagcgagagagaaccctgagggtaattgacctgatggagaactgggtggccaagagcagacccaaatactgcttcaaggttttggctccctactcctcagaagtgattgagcgtctggaactgtttcaaagaagatttggtggcgggataatcagggttccactctcacgcaactcaacccatgagatgtactacactagtgaggtcaccaataacattgtgcacatggtgaactgcgtctcaagattgctgctccggagaatgaccaaccccagtggaatagccatcttagagccagatgtggtttttccaacaggaacacgcaatgtcaagggggacttgggccccttggacatggagaagatcaagatgcgtgtatccaagttaaaaaaggagaacttggacacatggtggcatgatgaaaatcatccatacaggacctggcattaccttggaagctacgttgctaaacagagtggcagcgcagccactatggtcaatggaatagtcaagctactgagcatgccatgggataggattgaggatgttactgccttggccatgacagacacaacaccatatggacagcaacgtgtgtttaaggaaaaggttgacactagggctccaccccctcctccagggactaggaaaatcatgagcattaccaacacatggctctttgatttccttggccgaagcaaacaacctagactgtgcaccaaagcagagtttatagcaaaagtcagatcacacgctgccataggcaacatgttggaggagcaggaaggctggaaaaatgcagctgaggcagtgaatgatccaagattttgggaattggttagtgaagagagggagctacacttacaaggaaaatgctccacatgcatctacaacatgatgggaaaaagagagaagaaacccgctgaattcggacgtgccaagggaagcagagccatatggtacatgtggctcggagctaggttccttgaatttgaggccctgggtttcctcaatgaagatcattggttctccagagacaactccaagggtggtgttgaggggatgggcttgcagtacctaggctatgttgtggaagatgtgtggaagaaggggaatggaatcatgtatgcggatgacacagctggatgggacactaggataacagaggctgatttggaggatgaacaatacctgcttgaaaagatgagtggcactcacaagaaactggcttgggctattacagagttgacctacaagaacaaggtcgtcaaggtccctagacctggacctggaggaaagattctgatggatgtgattgccaggagggaccaaagaggttctgggcaggttgtcacctatcccctcaacactggaacaaatctcaagacacagttaataaggatggctgaaggcgagggcataatcaccccagaggacacactccaactcagtcacaagaatgagaaaaatttgagggaatggttgtgcacccatggtgctgaaagacttggtagaatggctgttagtggtgatgattgcattgttgcgccaattgatgagaggtttggcaacgccctaagtcatctcaatgccatgtcaaagattagaaaggacattgatgattgggagcccagcaagccttggatgaaatgggaggaggtgccattctgctcccaccatttccaccatttgctactgaaggatggcagaagaattattgttccatgccgaaaccaagatgagctgattggaagggcccgagtgtcaccaggaaatggatggatgatcaaagaaactgcatgccacagcaagtcctatggtcagatgtggctcctcatgtatttccataggagggatctgagattgatggctaacgcaatatcatcatgcgttcctatcaattgggtgccaactggaagaactacatggtcacttcacgctggaggagagtggatgacctccgaggacatgctggaagtgtggaacagagtttggattttggacaatcctcatatgagtgacaagtcagtaatcctagagtggagagatgttccatatctggcaaagagtgatgatatcaggtgtggatcattgatagggacatcacagagagcctgctgggcagctaacatccgttctgtggttgagaaaatcaggcatttggtgggagatgagaagtacaaagactacctgcactccatggacagatatgccctggaacactccgaaattggctgcttgatataaattaaagcactccattaaaccaaccaaacactccttcatcaaacaacactccatatttaaagtgtcaggccgggaaaccgccatggctaagctctgaggccatgcagtctgggagagcagcacattcttgcccacagttgtgcttaattacatttttgggagcctccctttgtcatgcgatgcatggtggcaaagcgacgaggactagtggttagaggagaccctccctgggctatgcatcaagtcggaccgtttctacgggaagctgtaaaccgtactgtccgtgacagcattccgaaaggttgggcgaagctgtaagcctgtaaaactttggagcctccgctctgcgacccgtgtaagcagagtcgatggggactagtggttagaggagaccctccacagcaaacaacacacacggatcacattgacaccagggatagaccggagattcttcttgcctctcgacagctttaggcaccgattgccaaactacgaagctgtcgagaaacgacaagaatct

SEQ ID NO: 35 - DNA, 11806 bp, Artificial Sequence
  synthetic
gggtcggcatggcatctccacctcctcgcggtccgacctgggcatccgaaggaggacgtcgtccactcggatggctaagggagagccacttttctctcgattctctatcggaatctagggagctcggatccagacatgataagatacattgatgagtttggacaaaccacaactagaatgcagtgaaaaaaatgctttatttgtgaaatttgtgatgctattgctttatttgtaaccattataagctgcaataaacaagttaacaacaacaattgctcgagggggggcccggtaccttgaagctgtccctgatggtcgtcatctacctgcctggacagcatggcctgcaacgcgggcatcccgatgccgccggaagcgagaagaatcataatggggaaggccatccagcctcgcgtcggcgcttaaggatcatgatgataaacaatgtatggtgctaatgttgcttcaacaacaattctgttgaactgtgttttcatgtttgccaacaagcacctttatactcggtggcctccccaccaccaacttttttgcactgcaaaaaaacacgcttttgcacgcgggcccatacatagtacaaactctacgtttcgtagactattttacataaatagtctacaccgttgtatacgctccaaatacactaccacacattgaacctttttgcagtgcaaaaaagtacgtgtcggcagtcacgtaggccggccttatcgggtcgcgtcctgtcacgtacgaatcacattatcggaccggacgagtgttgtcttatcgtgacaggacgccagcttcctgtgttgctaaccgcagccggacgcaactccttatcggaacaggacgcgcctccatatcagccgcgcgttatctcatgcgcgtgaccggacacgaggcgcccgtcccgcttatcgcgcctataaatacagcccgcaacgatctggtaaacagtatattttgcgtgtgcgtttcaaaacacagattgtattgaaagtacgtaagagtataacacgttggaataaagttttggatcaagaggaaaatcatggttacaaaactcaggaggcccgttaaacgggccgtcgatatgatgaggcgcgcggtaccccgcgccgcaggaccccggcgggtcctaactagggtatcaaataccgtgaagcgtaacgcaggcgctcttagagctcttctggcttatctgctgtaccagacattctctgggcggaaagttggtagtggtgctcggagcgcccttaagcgcttcaacaaaaatgacattgtgaaaatgttgctggcgttcagacggacattgacaaacatcatcacaaccatgcagcgtcgtgtgaaaggaaagaaacgtcgtggcgttcaagatgtgccgctattggtcttgctgctcgttggagcaggagcgatggctgccactttacgcaccgttggagacttgacatggctaaatgtgtcaaccactgatgttggaaagtggatacgtgtggagaataggcacggcaaaggagagtgtttcgtcacggccactgacgttggaacatggtgctcagactctgtgggatatgaatgtcctcaaattgcaccggcgtatgaccctgaagacttggattgctactgccgaaacacctcaacctacgttacttatggaaggtgtaaaaatgggcgcagtggacgatctcgcagcaagagagcaatcacgatagccccgcacggcgaagcaggattgcgtgttggaagcaccaagcattggacttctagagcaactccacaacggtatctaatgcgcgttgagaaatgggtgctgcggcatcctctacctgctctcgtgttggtggtactgggatggatgatgggtcgttctcacggccagagggccatgtatatagtgctgatgctgcttgtggctccgtcatatggtaaccaatgcctggatgtgcagtcacgtgatttcgtgcaaggggttagtggtggcacctgggtagatgttgttttggatcatgacaattgcataaccattgttgctgacgggaaaccatcttttgatattcgtttgtcgaaaatgagcatgtctaaattcgcagagtacaaacggtattgcctccaggccacgatgagtgatgtcactagcatagtggcgtgtccaggggctggggatgctcataatgacaagagcaaaaaccacgagtacatttgcaaagctgttaacaatgaccgcggatggggcaatgggtgtgtcctttttggcaaaggatcaatggaaacttgtggtaagtttgaatgtaagaagaaaatggctggcaagttagtggcacgtgagaacgtggaatcagtggtcactgtgcatgtacatggtgcctccgcaactgacacaaaaggagttgacaccgcctctacagccaaagcgactatcacgccaaaagcttctgtggctactctaaatttaaacgactttggtagcctggaggtggattgttcaactgatgttggcatggactttggagagattgtggtggccgacatgtcaggaaagtggtggatcgtgaacaaggattggttcaatgaacttgctttgccgtggtccacggctagcaccactgctgaagtttggcaggcacgagacagacttgttgagtttggatggccacatgcggccaagcagaacatctatgacattggggaccaagaaggagctgtgacggctgccatagcccaggcacccatggcgaaatgggagtctgacaaggtcgagctaatctctgggattctcaagtgcaaggtgaaacttggcaacctaaagctgcgtggggtgacctatagcatgtgtgcccagacattcaccacggaaacaaggccggccgacaccggacatggcactgtggctttcaaggtgaaatacgtcggaacagacgtgccttgccgggtcccactccacatcatagacagtgacggcggagtggccgctggacgagtgataacggcacaccccttcgtcatgaagcagaatgattacattattctggaagttgaaccacccttcggtgacagcaaaattgagattggaacaggaacaacaaaactcgttgaagcatggcatcgaaaaggtagctcgataggaaatgcctttacggccacttacaagggcatcacaaaattgacagtgcttggagaacatgcctgggattttaattcactaggtgggtttggagcaagccttgggaaggcggtccatacactgtttggaggtgtattccgggtgatgttcggaggcatgggatggttaaccaagatctttgtgggtgctgtcctagtctggctaggattaggagctcatgacaagacgatcgccaccaccatgatcctggtaggatccatactgatgtacatggcagtgaccgtgggtgccctatcggaaataggatgcagtctggacattagccgaaaagaaatgaagtgtggggacggagtcttcatcttcagagaggcaggcatgtggaaggatgggtatgcgttccacccttccgaacccaaatctctggccgcgtcagttctcaagagttggcagtctggagtgtgcggcgtgcgctccacgaacagaatggaacatgccatgtggaaacagattgaaaatgaattgaacggcattctagaagagaatgaggcgcaactcagcgtggttgtgcgagagtctaacgggaccttcccgagaggagagcgccgcatgcacgtggccgaacctctgcgctatggatggaagacctggggaaagaccgcaatttcgacggtgccgctcgctaaagaaacgtttgtggtagatggcaatgatgaaggagaatgtccctctcaaatgcgtgcttggaattccttccaagttgaagagttcggaactgggctggtgaaaaccaaagtgttcttggacatatccactgctctcaccgcccaatgtgacaccaaaatgctgggcgctgccataaaggggaataggtctgttcatggagatccaggtctctggatggtctcagctgaaatcgatgggacatggcagataatagagctcacattggcagagagcaggcgttgcacatggccagactctcacaccgtgtggggtaggaatgtccaggagagtgagttgatactgccaccgtctttcggaggaccgatgaccaacatgaacaagcgtaaaggctacgcgacccaagtgggaggaccatggaaccatgttccactacgagtagtttttgaagagtgtccgggaaccactgtatctgttgaaccaaactgcaccaggagatcggattcagtgcgatccacaactgatagcggcaagattataaccgactggtgttgtcgttcctgtacaatgcctcccctaacgtaccgaacccccgatggatgctggtatgcaatggaaatcaggcccaagaatgttaaagaggagagtctgatccgttcgcatgtggcggcaggtgtgtttaaaggcattgacgacgtgtcactggggctgttagtaatgataattttcctgcaggaaggtttgagaagaaagttaactgcaacgtatatcatgtgggctgctcttgtggtcctcattgcaggaatcctaggggaactcacagtgagggatgtgctcaggtatctcatcctagtcggcactgcattcgctgagagtaataatggaggagatttaatacatctggccctagtggcggtcttcaagattaggccggcattcttatttggattcttgttcaggagtcagtggtcccccagagaaggtgtgttgctggcatctggagcgctgatgctgcagattgcaagtgagtgcttgcacgcatcggcgattatgcaggttgtcgattccttgagcatggggtggttgatgatcagagccattgctgtacctggtatgacctcaaaagccatgccactgctgtgtgcctgcattcctgcagttacgagcctactggcccactcaaccagagccggtataatcaccatggccggcatgtcgcttattgcaggaagtaagggatcatcagttaaaaaacacagtccatacatgcttgccctcgtggtggcaggcctcggagcccgtcccataggaatgttggcgatggaagccttctctcacctgaagggccggagatcatggccggctggtgagatgatgtcagccgttgggctgacatgtgcgctagtgggagctatcagtggcgcatcatctcaggacttcgccggacctctagcagcagcggctctaattattattgcatatgccattagtggacgctcagctgatgtataccttgagaaagccggtgagatatcctggagtgaggacgctaaaatatccggatcaagcccgcgcattgatgtgtgcgttaccgaaaatggagatttcaaattgcgtcatgagagtgaagcaacctggacccggaattgtgtcttggctgcttgcttagtcgtagccggagtgcacccactggggattccagtagcagggttgatgtggtttggatatgtgaaatcaaacaagcgggggactgtgttgtgggacattccctcaccacaggcaacatcagctccaacggtggaagatggatgctaccgcgttatgtcacgtagactgcttggcagcactcagcttggtgttgggatcatgctagactctacatttcacacaatgtggcacataacccgaggagcatctattgttagtggtgaagggcgtcttgacccatattgggctgacgttaaggaagacctggtctgttacggagggccatggaaaatccgcaacacatgggatggactctcagaagttcagctgatagcggtggccccaaaagagaatcccgtgaacgtccaaacaatgccaggaaagttcattgtggcgaatggaggtgagataggagccgttgtgctcgactatcctcctggaacttctggttcacccatcgtggatcagcagggtaatgtcataggactgtatggcaacggggttatgatcaatgaccaaacgtatgcgagtgccattgcgcaagctccagctgaagttgcgcgcaccccaacctggttcactgatgatatgttgcgaaagggacaattgcatgtgctagacttgcaccctggagcgggaaaaacccgcaaggtcctgcctgagattctcaaagcagcggtggagaaacggctacgcacgttggtcctggccccaaccagagttgtggcaaaggaaatgcatgaagcattgaccgggctgccggtacgctaccagacatcagcagtggcaccaaatggttctggaggagaattgattgatgtcatgtgccatgcaacatacacacaccgccagctgacaccgggacggggggtcaactaccagttatacatagtggatgaggcacattttacagatcccgcttccatcgcagctcgcggcatcattgcgactagggtgcgattgggacatgccgcagcaatcttcatgacggccacacccccgggaatgtcaaacccattcccggagtctaatgctcacattgaagacgaagagcgggaggtacccaccaaagcttggaacgctggatatgagtggataacagactatgggggaaaaaccgtgtggttcgtgccttccatccggatggcgaacaccatagctgcatgcttggtacgagcaggcaagacagtcattgtactgcacagtggctctttcaatgaagaatatcaaaaaaccaagtctggcaattgggatttcgttgtgacgaccgacatctcagaaatgggggccaatttcaaagcctctagggtcatagactctagactgtccataaaaccgatgttttcctacgctcccagtgagcgagtggttattggctcacctagagcggtttctccagccagcgcagcacagcgccgagggagagtcgggagagaccctcgtcaactgggcgaccagtatatctatggtggaccagtaggagaagactcggccgagttcgttcattggaaggaagcaaggatcctcatggataatgtaactgtccctgggggcttgtatccacaattctacgaaccagagggtggaatgtgtgacgccatggatggagctcaccgactgaccgatgctaagagagaagtgttccgagacctcatgaagaaaggggaacttcctgtatggttagcataccaggtggcccaggctgggcatgcgtacactgacagaacttggtgctatggggggccggcggatcatcaagtgtatgatgattgcggccaaaccgtggattacaggtcccttaatggagagaggcgtatgctacgtcccaagtggcttgatcagcgcacctacaacgacaaaacatccttaaggctcttcacggaatttgcagagggacgccgccgatattcggaactaatggacgtgtttggaagaatgccccaacacatgttggacaggaccatcttggctgcagacacgtttaaagatgtcctgacagcaacaccgggatctcgtgtgcaccgtttagcactggacaatttacccgaagctacagaaactatgatggtagtgggaatcctgagtgtctcgaccctaggcgttatgctatttctgatgtcacccaagggcatgacccggatgacctgcggacttgtggtgatcatcctggcgacgtattttctatgggtgtcaggaatggccggctaccagatagcagcaatgcaactcatcgcgttcattctgtttgtggtcttggtgccagagccagggtcacagagatcagtgcaagacaacaccatagcgataattctcatagtcatcctgtcgttggctgccatcatagccgccaatgaagcaggattgctagagaagaccaaaaaggatttcgcgtggaagagggagagtcatgtgctggtgactccgagtccgtggaacctggatttctcaatggatttgaggccagccaccagctggtcattgtatgtggtgatggccaccatgttagggccagtactggaacacgccattgtcaccaattatgctagcgtctcacttactgccatcacaaaccaggcaggaatactgctgtcaatggataagggcactcctttctggaatcttgactggagtgttgtcctgttgtgcgtgggcagctggtcggggatcaatggcactacactaatggttgcttccacaatgacagttttgcattttgccatgatactacctggcattcgtgccaaagcggcgagagaagcacagaatcgaacagcagctggggtgtcaaagaaccctcttattgatgggttaaacaccataaacatccagccgttgccggaaatggaccccatgtacgaaaggaaaatggggctatggatgctaatcgctgttgccggagccgcggtggtttttgacaagagaatgctccattacaccgagttcggagtattgggttcagctgctgtgagtcctctcattgaaggatacgcgtctgctgtttggaacacttccgtagcagccagtgtgtgcaacctaatgcgaggccattacatggcgggaatcccaatggcatactctctgatcagaaatctatccatgaaaggagttcctaggaggggattacaggccacccatacccttggtatggtttggaaacacaaattaaacgccatggacaaggcggcctttaacgcataccggaaggatggagtgacagaagtggatagggagccagcacgtgaagctatgaagaaaggagatttggtgagcggatgggcggtctctcgagggtcagccaagctgcgatggatgcacgagcgtggatacattcccctacaaggagttgtcattgacctcggatgtggaagaggggggtggagttactacgctgctgcacaacgccgggtgaccgctgtcaaagggctcacgaaaggcggaccagggcatgaggagccaatcaacgtccagtcatatggatggaacttagtgacgttccgtagtggagtggatgtctttcacaccgaagtccagccggctgacaccctgttgtgcgacataggagagtcttctgctgaccccgctgtcgaaaaagcgcgcacagtacaagtgttggtgaactttgaaagatggattagagagtcgcggtgtgagcatttttgttgcaaggtgcttggtccctactctcccgaagtgatggagcgcttagatcgtttaacaaagacatatggaggagcggtaattcgcaacccactatccaggaactccacgcatgagatgtactgggtgtcaggagctaagggtaatccagtcaatgctataacagccacctcacgtgtgctaatcgaacgcatgtacagaagacttggcaagagttactgggaagaagatgtgaatcttggtactgggacccgtgcagtttcatgtgccgcggagaagccagatctagcaaaaatcggaaggcgcattgagttgctgaagaaggagtataaagcatcatggttcgaggatccagagcatccctacaagacatggacataccatggttcctacgaaaccaagaccacaggcagctcgtctagtatgattaatggcgttgtcaaggagatcactcacccttgggataccaacccaagggttacaaccgtctgtatgaccgacaccactccttttggacagcagagagtattcaaggaaaaggtagataccaaggcacgtgagccatctcaagggacgcgggagatcatgagaatagtgagcaagtggctcacactatatattggtcggagcaagcgccctaggctgtgcacagcggatgaattcatagccaaagttaatgctgatgccgctctcggcacgatgttcgactcgcagggaaactgggcgaacgccaaagaagctgtgcgcgacccacggttttggcagttggtggccaaagagagggaacttcacctgcgtggacagtgtgccacgtgtgtttacaacatgatggggaagcgagagaaaaagctgacagagtttgggaagtcgaaggggagccgagcaatttggtttatgtggctaggagctaggttcttggagtttgaaagtttaggcttcctaaacgaggatcattggttgtcacgtgaaaactcaggaggtggagttgagggcattggattgcaataccttgggtatgtgttgaaagaaatggcactaattcccgggggcaagatgtacgccgatgacaccgctgggtgggacaccagaattactaacgctgaccttgaggatgagatggacatattgggacttatggacccgcatcacaaaaaactggcaaaaaatctgatggagttggcgtacaacaacaaggtggtcagagtgatgcgccctggtaaagggggaaaaacactaatggacatcattagccgcaaggaccagcggggaagtggacaagtggtcacctacccactcaacacgtggacgaatctcaaggtccaattgatccgtatggcagagtcagagggagtgttggaccccaaggagatcgatggaatcactgtcacgactcggaataacctggaaaaatggctcactagccaaggggctgagcgtctaaagcgcattgcagctagcggtgacgacgttgtggtaaaaccagtggatgagagattcgccaatgctctcacctatctaaacgacatggccaaaattaggaaggacatcagtgagtggaaaccatccgcggggtggttccactgggaagaagtgccattctgctcacaccattttcaccagttggtcctcaaggatgggcgcaccttagtggtcccatgccgtgaccaggatgaactaattggaagggcaagagtgtcacctggtgctggatggactatcagagaaactgcaggtctaagcaaggcctatgcccagatgtggcttctaatgcacttccaccggagggacctcagaatggcaggtttcgccatttgtagtgctgtccccagtgattgggtgcccacgggaaggacatcgtggtcactgcacgctaaaggggagtggatgaccactgaagacatgttagcagtttggaacagagtgtggattgaagacaatccccacatgtctaacaagactttagtgggatcatggcaagacatcccgtaccagaggaaatccctggacatccactgtggctcaatgatagggcagcggtctaggtcaacatgggctgctaacatacgaattagcattggacacgtgcgccgattgattggaaccacggaaaagtacttggattacatgcaggagcaggagcggttcaagattgctgaaccaacccgtctgggcaatgtgatctaaggatctacgaacgagaataagtagaagaacggaacgacagagtcaggcctcaaatgagccagcattaatgagagtaagtgctgctgcctgtgcctctccttaacacgtggtagcgccactcgtgtttcgttacctaatagcgctagagtcagacccaagtaggccagggctatggttgtaagccctgctgtctgtggcagccatccagtggtaatgcgtcgcaccactaaggattaatagacgtatattgggagggactggtgaggagcagcaagctcgagctgcatcacccactggtactatcggttagaggaaaccccctccaaaatgtagagcatcatatcgacacctgggaaagaccggagatacctcttgcttcacagcactcaatccacaaggcacagatcgccgaataattgtggattggggattgagaaacatcaagtatct

SEQ ID NO: 36 - DNA, 11690 bp, Artificial Sequence
  synthetic
gggtcggcatggcatctccacctcctcgcggtccgacctgggcatccgaaggaggacgtcgtccactcggatggctaagggagagccacttttctctcgattctctatcggaatctagggagctcggatccagacatgataagatacattgatgagtttggacaaaccacaactagaatgcagtgaaaaaaatgctttatttgtgaaatttgtgatgctattgctttatttgtaaccattataagctgcaataaacaagttaacaacaacaattgctcgagggggggcccggtaccttgaagctgtccctgatggtcgtcatctacctgcctggacagcatggcctgcaacgcgggcatcccgatgccgccggaagcgagaagaatcataatggggaaggccatccagcctcgcgtcggcgcttaaggatcatgatgataaacaatgtatggtgctaatgttgcttcaacaacaattctgttgaactgtgttttcatgtttgccaacaagcacctttatactcggtggcctccccaccaccaacttttttgcactgcaaaaaaacacgcttttgcacgcgggcccatacatagtacaaactctacgtttcgtagactattttacataaatagtctacaccgttgtatacgctccaaatacactaccacacattgaacctttttgcagtgcaaaaaagtacgtgtcggcagtcacgtaggccggccttatcgggtcgcgtcctgtcacgtacgaatcacattatcggaccggacgagtgttgtcttatcgtgacaggacgccagcttcctgtgttgctaaccgcagccggacgcaactccttatcggaacaggacgcgcctccatatcagccgcgcgttatctcatgcgcgtgaccggacacgaggcgcccgtcccgcttatcgcgcctataaatacagcccgcaacgatctggtaaacagttttaaaaaacttttgcgttagtaaaaccacggagttttggtttgctgagaatagtgcgagggttgttttaattatttcggagattttggttcgtgatgaatcaggagagaggaatactcaggggtatggggaggttcccccccccccctgtgaagaaggggaacaagaattctgttgccgtggccagggtgccaccgcagcaaggaggaaaagcgagagagaaaaaccgtgagaggattaaagcgccaggagcgcgacatggagttgccggaaagatgaaaagtctaatgggagaattgggctttggatggattgatttactacgcgttgatttggtggaaggaattatgatgatggtttttgttatacagcgggctttcgcccaagtgcaccggagaattagaggattatcaagacgcgtcagggcattggagaagaagcgtgacggtcgagcggctatgttcatttggactatattggcaatgttattcggagttatgggagttgtggtgattgacatgcgtgtgacgtatgacggacaagtgcagatttatcgcgacggagagaatatgacagatcgagttgcgctctttaagctgccaactgacggttgttcagttgggttgccagtttcaaagatgtgccacaaagtggataaaaacatgaaagaaggattagcggacacggattgcggatcaacatgggcagagtttaggttgagataccaacgatgccaagtgaagacacgagcgaagcgagttgcgccagatggcccaaagcaagactttttggcagaagtggaaatagtggcttttaaagccatccgggaaaacaaaagtgtgttgcttgtggtcgtgttgtgcgtggccatcgcgaaaagatggccattgtgggtgttgatactactgtcgattggaacatggacaacggttcgaggagaatacatggaaccgttgtatgtattgaaagcagaccagatgacaatgattcagacaacgttgaggccagaagagggatacgtgacagcgacggcaaatgggttatttgagatgaaaacaggaagagcgttcatctatggaagccaagtggtgaaaacactggtaactgactgtgaagttaacgcgacatattcaactgatatatgcccaggcggatcgcagctgtcaatgcaggacattcaagcggaaggaagagcatgtgcctcggagccgtataatcgaggctggggcactgggtgttttaagtggggagttggattcgtagcaacatgcgcggaggttgattgcaccactagtgtgaaagttagctcagtggctcgctcgacaattaagatgaatgtgacggcaacataccactcagtgaaaagtgtgcagagtgtgataagtgatgtacctgtgacattccaatttgggcagctgggcattgcctctatgacatgtcgtttggagtccgaccgaattgcccaatcatactatcacgtggaaggaaacaagaaggagggactattcatgaaggaacagattgatggatggaacggagccacgttggctgctggaaagatagccaacacagagaaaattgttatttggggagatgtgaaaccaaatgaaattttggttaaggcggtttcagaaccccaactggaatggactaatgctatagctacacatgatggcttccgagatgtgggatttgtttgccagataatgcttgacaagcttgttaccggagtgtttaaagattgtaagacccctaaaacgtccacattcacacaaagcggatttggctttgacggaattataactaccacgttagctgtcgcccaaactgaagcctgctcgatcagcatctcctgtaaaggatgcacgcttttggcaacaaaagcagtgttttccgctggggatattgagtcgaagacatgggtgcgatgcggaaacgagagtggaacagcgatcgttggaggacaagaagttgccgttgcgtgcgccacaaatcccatcacgcagggatggagattggtgaagcatgctactcaacgttaccggaagtttggaatgccaggagtaggtggagtattccacgatttagtgggaacattaaatccatggagtttcttctctaccacgactctggttttcatggcggtagtccttttcatcgtggacaaaagaatcttgattttggggatagcttgttatatgttttattttgtgcgagccgacttcggatgtggatttgacccagataggaaggtagcacagtgtggttctggctcattcgtgtggaagtcactggcccgttggccaatggctgatcacgctattgagtttgaagatagcaaagtgatggtgacttacttgactgacctattgatgagaaagaacaaagtctgcatagtgtgtgaagatgtattgcagtgtgccgcagcgcgtggagttgtcgagcagataacgtcgatcaatggaatcccaatccatcacaacatgtcgctgtcgcatggccgatatttcccacgtgtagtgaagaaagtacacaatgttaaggtgggaaaagccatgttgcgccttgcaatggccacatatgcgggagcgatgcctgagagtggattgggtgttttgaagacggggtatttttcacgcggagaagtgcaggaaacgtgggatgataaagttctaagagtcctaaccagcgccataaatgcagaggaagtgtgccagacggctgtcacgttccagtatgagttcgttcgatataaccggaaagtctttggatctaacatcgtgttgcgaccttcagcctttacgagcaaagcttgcccaacatatttagctggggctgtggtcaaaaacgacatagcaacgtttacggacggaatgatgtggatgcggagccggaaagtcaatgaaacgtgggaactgtttgagttggaaacaacccaaagccaccaatgcatttggccatacgcgtacacaatagacctagcaacacccacggacaagaggcttttcatgccgccacaatacggaggaccaatttcgtttgcgaaccacgtgcctggattccaggtgcaagaggactttccctggcagaaggcgaatatattaatgcgccagggaccggttccgggaacgaccgtagtccaggatccacactgtgatgaccggagcgcggcagtgccagttgaaccaactatgcaagcttggtgctgcaagacctgttttgatagaggagtgaagcctttccattttgtggttgacgggaaatttttctatccaatggaagtgcggccaatgaaactggaacaagacgctgtggtgattgagactgatgatggagagttcgagaggagtgagcatgagagcttgtttgaaggcaaagcaaagtggacatcaccgttaccaatgggagaaacagccaagattcaaaattttttcgtgaccagcccgccaaagccggaatcaagcctgcttttggtgggcgttctgattcatatgttaacaacgcgaacccgccatcggtgggcaactcgttgtgctggaacttggctcatctttttggtctttggacatccggttgtgtcttcggtgcagtcttgggcgtggctctttatgtcagctgccttagcaagtgtccctggtggttcttcactggtgatccacttctggattgggttgcagatatcgtcagcgcacctcttttacctgggttggttaatgaggaaacgcctgttgattacagagatgtcgcgagtggcacatctgattgcccagttgtgcagcttcgagacatatgcgtgggcaccgatcctcaaagtactggatcacttgctgtttccactctacactctgtcagtattcgtcgttcaccagcagtttcaggtattccacgacttgtggctacagagcgccgtggtgatggcacacctgttgcaacaccctctcagtggtttaataaccttgagtttaagcgtcggcttgattcagctaatagcaccaatgaaaagatggttttgctcaccagttatatggggagatggcttacgcgcgccgagaccacactggacagccttaacgtatttcatcgtgctgtatttggcagccgctgggatggagacagtgggtctgcacacgtccgggatgacagtgatgctgggcgggatgcttctgtgggttgtcctacagttgatgcccccgacagccttggaacttgtgcgcctaccgggacaaagtctgccagacggatgtgaagaagaagcgtcaacatctctaccagaaggaatgagtgggcattacgcccccgatggagttgaactcgtgaactacacagatgcagggactgtctccgcaaaccttgtggtatttgttgggtgtgctggaattatgactatgaacatatacgttgggttggttatcacggccttggcctgggtaacggacgccccgatgtggattccaagattgattgatggtgctatgtcccagcgggcaaattcggagctattgctgccatccccacctcttgagatacacaagacggaagactcgtttggttacatcccggacggaacatatcacgtgttggctagcagctggatgagcaagaaaccagttggtgttggagtggtgaaggagggcgtgtttcacacgttacaccacgtcaccaaaggagctaatgtgacatgggcaggacgtgaggttaggatgcactctggagatgttaggcgggatattgctgcctatggcgggccctggaacatcagcgggagtcttgaagatgtcgtagtagtgaaggccgtgaacaaggatggaaccgtgacatgctgccggattacaacagctaagttggacattgaaggaactacagtgatggctgttgagcgagattttggtttcggctcttcggggtcccccatatacgctcctgatggacggttgattggcttgtatggatacgggttttactatggaacgtacttctcaatagtttcaacaggagaaggagtggaggcaccaccggaagaggttgaagtctcaacacgtgagtttgtggactggcaccctggaagaggaaaaacgcgcacgatactcgttgagcaggccctgaagcatatagctgatggaaagaggttgctaattttgacaccaacgcgggtcgtaaaggatgaagtgcagcgagcgataaaggaagccgccccgcaggcggttatcggatcgaacttaagcatttttcggaagaacgccgttaccttggcatgccacgcgaccttcacgcagtatgtgatggagaaggggatagaaagtgtgaagttttcgaccatcattatggacgagtgccactttctggacccgatgtccatcgcgtgccgcgggataatggatttccacaacagccgtggaacgaaggtcatcttcatgagtgcgacgcccccaggacgagcaggaaacgctgggtccaactttacaatagaagacagagccatcaagttccccaaggagttgaccgcatcgtggatcaaagacaagtcaataggcaagaccatcgtttttgtgccaacaattacgcaagctgtgaggctggctaaagagttgggaggggtggccttgacccgagatacgttcaatgatgccatggggaaggcccggagtccggaaacaatgtttataatctcaacagacatcagcgagatgggagccaatctcggagtgactactgttatcgacacaagaactgttataaaaccattagtgtctgacaaaggagtttcacttgaaagggttggtgtgaccccagcttcaatcatccagcgcaggggccgagtaggtcggcgggagcccggagtatacatttatccccttgacgtcgaaccagaggagcagccggaaaattgggtgtgttgggtggaggcgcaaatgatcttagatcaattgggctgccatccgatgagagaggagagcgaatttttccgcccacaaggcacgtaccggattgacgacgtagagcagcggaggtttctggggttgatcaaggaaaaactgccaatttggcttgcttggacttgggccagctcacatgcgaacaaacatcagatgctatttcagggaaacgcccccaacactggacgaacattaaaaataaagacgccatccggatctcacatttacgccccaaaggtgacagatgataggtttgaaaaggagccagaaattgtgaaagtggcggccatcggattcttcctaaagcagagatcactatacttcgacttacctggattattgaccggattgtacacggtgttgacaacggctgggctcgatgcccttggaaattcgttcaaacgctctgtggacacccttcacgacatcggaaatgcggtggaaggagagttttctgctatacaaatgggacggattttacagatgtggtctgcgttgtttatcggggtgactttgggagttgtgctgatgggagccggatttgttgtggtgaaggcttttagaggattgtttggaacccgccaacaacacacaactgtgtgcgtgtcggagggcggaagtttccaaaaagttgccacggttctaatgagcgttggaccattgtgcgccgtttttggtggcattccctctatattcgtcttcattgtgaccgttgccctgttgattgtgctgtgtgtgggcggaggtggctctcaacgtggtgtgcttgattcggatctaatacgctgggtcatggtgttggccatgatgacaatcggagtgactgcgtgggagttggagctattaccaaacgtgagaagagatgttatacagttgactcgatacctgtttgctagcaatcctgccgttgttggagctgtgtttaacgccgggaatatcggattgggagtctctctgccagggaccctcatgatgagctacgccgcgagcggaacgctggccccccttattggagcgtgggccgaaggaaatttcttaggaaagctctttggtagcgaagtgcttccagctcaggctataggcggatttcaagtgacagctatcccgtggggatctatggtgccggttatcgctggttgctttctagcgacaaacactctttcgaaagtgtttggtgctggaattacaactgtgtttctcatactactctacttcgacaagaaacatgcattcacgaacaaggctgttaaggttttgttggcgcggacaaacagaagggacatggaggaagaaatcacaacaagggacgcggagtcgcgggctcgccaactgttttatggcctacaactggccgtatcgttgctgtgggttctctcacatcctgtgttggaaaacttcgttccattctttgctgtgtgcgggtacacattcctgtcgctcttgaggccaaatcatcaactacatgctgcgttggattatacattggtagtcctgctcttgcaggtagttgaacctgggaacatcatgtacgtcggcggatgcgttttgttatggtatgttttaaaccctaccagattgggcgtgcgctcgctggtgaagagtgacaccggaggtttaggcttccgttggaagaaagcgttgaattcacttagtgagaggcagtttgccatctacaaagtcagaggcgtgaatgaaactgataaaggagcctacgtgtcgcgaggtggtttaaaaatgaacgagattatcaacaagcatgcgtgggaacctcgaggagttgtcgttgacctgggatgtggacgaggaggttggtcccagcgcttggtgatggattaccgcgtcgctgaagtaagaggatacacacttggaggcaaagaacgtgagaatccccaaccgttccaaacgaaaggatataacttggcgaatttgaaggctggagttgacgtctataaaatggagccagtgaattgtaacaccataatttgcgacataggtgagagtgacccgcgtcctgaagttgaaaaaactcgaacgctgaaggttttgggaatgctggagaaatggctggaagtcaatccaaacgcctctttttgctgcaaagtgctatcaccttatcacttggacgtgcttcgaaagttagagtcgctgcaacacaagtataacgggcggctggttcgactgtcttacagtcggaactcaacagcagaaatgtattatgtgtcaggaaagagggcaaacgtggtggcaagcgtgtacttcatgcttgggtcgctggtaggtaggctgcggagacatgagccatcaatcatcgaccccccaccggttctagagatgggaaccagaagcgatccgcgagcaaaggccaaagcgcaagacttcgagatgatccgaagaagagtggaacgactacgaggagaaaatcggaaaacatggtttgtggacaacgaacatccatatgtgtcatttaactaccatggatccttcgtgactgatgaggtgacagcgggcggacaaacaacaaatcccttgattagacgcgttatgtggccatgggactttctgtctcgggtgacaacctttatgatgaccgatgtttcaacgtatgcccaacaaaaggtgctgcgtgaaaaagtggacactgtctctgaggagcccgacgagcgaatgaaagcaattaacagactcatcatgacacacttcgtgaaaatgttcaagcggcgcgggctgaaaccgagggtgttgacaccacaagactacatgaataatgtccaagccaacgcagccataggaggatggagcgaagtaatggattggcaaaacgtgcgcgatgctttggcagatcaacgattctgggacatggtagataacgagagggccttacacttgcgtggtgactgtgagctttgcatctataacacgatgggaaagaaagaaaagaagccatctgcctttggcactgcgaaaggttcacgcaccatctggtatatgtggctgggtagccgttatttagagtacgaggctttaggattcttgaacgaagatcattgggttgcacgagaaaactttccatgtggagtcggtggcgtcggcgttaactattttggatattacctgaaggaaatagccgggggaggccggtggcttatcgcagacgatgtcgcgggatgggacacgagaataacccaaggagatctagatgatgagctgttcatgttaaccgagcttgccccaaccacataccacaagaaattgataactgcgacaatgacgttggcttataaaaacatagtggccttattccctagaaatcatccgatgtaccgaagtggaactgttcttgatgtgttgtctcgaacggatcagcgtgggtcgggccaggtgacaacatacgctttgaacactgtgactaatggaaagtgccaggtcgggagaacattagaagcgtgtggcttgctggacgccccgctcaccacaatcgactcctggctcactgccaacttggaacgagttcttggagcaatggtcgttgccggagatgatgtggtagtggcgacagacaatgaagaattccacacgagtttgagatacataacagcgacgtcaaagatccgaaagaacttaggggtgagtgagccatcgccgagattcacgagctgggaagatgttgagttttgctcacaccacttccatccactgacgttacgtgatggccgtgtgctgatcgccccgtgtcgtgaccaaaacgaaattatcggaagatcaagaatccagaaaggcggaatagttgacatggcctcggctgggtgcttagcgaaggctcacgcgcagatgtgggccctttacttcttccatcggcgagacttacggattggattcgcggccatcacatcaattgtgcctatcaactgggtgccgacgggcaggatatcatggtctatccaccagaacgcagagtggatgacgactgaggatatgctaacggtttggaacaacgtgtggattagggacaatccgtggatgagaggaaaagaacgagtgacttcatggacagacataccgtatttacccaaaggagtggacataaagtgcggaagcctaataggcgattccgaccgcgcttcctggtcaaagacgattcccctagttgtggagaagacccgaaaaatccttgagcaggagaggggaacattgaagttctacaatgggttatccattctaggacggtatgttcaccacgtcgatcctgtgttcaactgaagtgtgacgatgtaggcccgcgggagccttagaattcaagagcttgggaattctagaatcccgtttaccgcaggagggggtcatatggagcaggtggctatgtatagcctggctaaatgtatggctcctgggggagtgacgcccctccggttccagttcctgggtgaacaggtaaaaaccaccacgaagcgccgcttcaacatcgcaagggggagaaatcccgggtgctgacgccaccccgaccccagtcccacataaggctgtgacgaaagagccttaccggcacgaggagtgcccaccgcaaggaggagaaatcctgggcgttgacgacgccccggccccagtctctgataggtgaccagaaccatgtcaccccaaagtgttgaaaggacactgatcaccagaaatggtgagggcacacagggcttagcccaaggtgagtgacgacacctcccgaaatgtgtaaatagcagggtcagctctaagcagcaggcttccaccgttaggaagcgttgctgtgagcttacttggctacgtct

SEQ ID NO: 37 - DNA, 11850 bp, Artificial Sequence
  synthetic
gggtcggcatggcatctccacctcctcgcggtccgacctgggcatccgaaggaggacgtcgtccactcggatggctaagggagagccacttttctctcgattctctatcggaatctagggagctcggatccagacatgataagatacattgatgagtttggacaaaccacaactagaatgcagtgaaaaaaatgctttatttgtgaaatttgtgatgctattgctttatttgtaaccattataagctgcaataaacaagttaacaacaacaattgctcgagggggggcccggtaccttgaagctgtccctgatggtcgtcatctacctgcctggacagcatggcctgcaacgcgggcatcccgatgccgccggaagcgagaagaatcataatggggaaggccatccagcctcgcgtcggcgcttaaggatcatgatgataaacaatgtatggtgctaatgttgcttcaacaacaattctgttgaactgtgttttcatgtttgccaacaagcacctttatactcggtggcctccccaccaccaacttttttgcactgcaaaaaaacacgcttttgcacgcgggcccatacatagtacaaactctacgtttcgtagactattttacataaatagtctacaccgttgtatacgctccaaatacactaccacacattgaacctttttgcagtgcaaaaaagtacgtgtcggcagtcacgtaggccggccttatcgggtcgcgtcctgtcacgtacgaatcacattatcggaccggacgagtgttgtcttatcgtgacaggacgccagcttcctgtgttgctaaccgcagccggacgcaactccttatcggaacaggacgcgcctccatatcagccgcgcgttatctcatgcgcgtgaccggacacgaggcgcccgtcccgcttatcgcgcctataaatacagcccgcaacgatctggtaaacagttttaaaagttaacccgtggttttaccctagtttcggtgaatttgccaattttacggaataactgtttgaaaggttcaaactctggtgtccaacgtttgtattaaaatgagtggattaggaggccttcttcccctccgagggaagaaaaagaaagcccctgtgatacaatcacagggcagggtcttgccgaagagcgactggaagggagctccgaaacaggatctaaataaaaagaaagcgaaaaaggacgagacgaaaggccagaattggccaagaagaattaacccccggactggacaatggtcggcaattgagggctctggtgctcggctgtggagaagcattttctctacagacttgatcggaggcttgttgttgttgatcgctattttatcaaatctctacgaaaaggttagacgtgacataacggaattgaaacgcagagtgactcgattggaaaaatctcgagctagtttgattttgaccccaatggtgttgctgtgtctggctatcctcgcggcaggcgtgacaatccaagtggttgtcactactgatgcacgaatcgagctttggtctgaccggaagaactttacagctcacgctcacctcgtcaaggttcctaccgacgtttgcaatgatggggtgtttgtaacaaaacattgtcccaaagttgagaagttgagtgaccttggcgaaatcgattgcggttcatcatggtctgaatttaccttgacttacacacgatgcgtaaccttggaaagagcctcacgtgcggaagagaagggaaagacaatgctggggcagttcaaggaggatctttccaccctggaaactgaggcttttttgctgtttaaaaaacatgcgttctcgaccatcctggttttgctagtattggccatcgttatgaagtggcccgtgtgggttgtggtaatactggggattctagcgtggaacgtcgtgaaaggtgagtttgttgagccattcttggttttaaaacatgaccacagtactatgctcatgaccagactgtacccaggagaaatcgctcacgttgcaactcctgccgggttggtggacattcgtgttagccatgcccaaatttttggaggtcaacgctttcgtgagttactgagcgactgctctgtgaacgcttcgtattcgaccgacatatgccccggaggatcacaacttgacttggaatcgatcaaaggtcctggacgtgtctgcatgaccgctccgtacaatcgaggatggggaaccggatgtttcaaatggggaattggagctgttgccacgtgcgttgagttgaactgcacacgggaaacaaaagttgatttgttgacaaattctgctattgtggccaacgtgacagtcaatttccactcgaccaatgacactaaactccttgtgcctgacaccccaattacgttgaagtttgggaagttaggaacgatgacaatgacgtgtcgtttgggaaatgaccgcattgctaacgatttttaccatgtaactgacaatattgcatctggactgttccagaaagctttgattgatgcgtgggaaggaccctccaagatggcgaaccacattagcggacatgaaaaagtcgtgaagtggggtcacattctcccaaatgagatcaaggtcagcaagatcattgaaatggagttagattgggaaaaagcgatcaccacacatgatggattttcgaacacctatttttggtgtcaagtggccgtgaacaagttggtcgttgggtcatttgcctcatgcaagagcggagcgaaggctagcttcatccaatcctcgtggggttttgatggtgtggttgaagtgactttggatgaggccaccaaaaccatttgctccctacccctgacatgtaccggatgtagcttgttggctacaaaagtggttttccttgagggaagccagcgggctgttgggcacgtggggtgtggaaatggaacatcaatgttgacagtaggaacgacaaaggttgggatccaatgtgtggtcacaccggtgtcacaaatttggaacttcgtgactcacgcttccggacgatatgcgaaacttggttttggaggagttggaggagctttccatgatctgctagtgaaggttggattgaccttcacctgggattcatggaagatcatcaccgtgttgtctggtctcgtagtggcttttgccatctttgatcggaagttggtgatcctgatcattatcctctgtggaatcgcttatacccgagctgacattggatgtggcattgattttgacaggaagacctacacgtgtggaagcggtctattcgtgtggaagggtttgggaaaatacccaacggccgaccattctgttgagtttgcctcatatgattttctatcagcgtacctccaggagcagtttaagtctgagaagaaggtttgtattatttgtgaagacattgtccagtgtgaggcagctagaaaagcagccgctgcggtgtataaaaacctaggccacccgtttgtctacgtgaacacgtcggactcctatggaaaagtatttgccgaaatcccgaaaagagtccacactgttagtgtgggagtcgacgttgtggaaatggccatgatgactagggagaacaaaccggttggaccgtttggtgacttaccgcgtagtatggtttcgtggaagagtatccctgaaacagaagagcacccagtgttgagagtgttgacatcttcaagtgattaccagaaggtatgtggaaaagcgattggattccagtatgattttgttggataccgtcggaccatgtatggatctaatgtccagttaaaaatatcaaagaaggtttcgattgaatgtcccacatacttggcaggagtcgccgtgaaaaatgatagaacggttttcactgatggaatgttctggatgtcatcgaaacgtgagaatggaacatacgcgatcactgagttagagatggagcagtctcacaagtgcatctggccagaccaatacactcctgacgccactttgacgccacgtgacaatgaaatgtttgttccgcctgagtggggagggccaatgtcgaaagccaaccacattcctggttacaaaatgcagactggatttccatggaacaaagcccccattcggtttgttgagggaagtgttccaggaaccattgtcacacagattagtcactgtgatggtagagggattgcagccgaagtgaatccagcaacgcagcccaattggtgctgtaagtcctgtacaaggattttccactttgaagtcgatgggaaactctattatccaatggagattcggcccgacccgaaaggaggggaacagcaaaaagttcctgtagtggagacacccattggagatgaagaaaccgagactgttggtggatggctgggtagaatgtataacattccaggagctgagggatcatatgcggattttcgactccccaagttgccaaattcaagaccaagcgcaatggtggggagtttggtcaatctattatgcttgatgttttcaattcagatagttaccaagactatgcgggcaagaacgcttatgcgtttctatctttgttgcttggtttttatgttctttggaatgccaactttgtttggattaagtgggtttttggcgtggatgatgattctaccaatctcacacaactcggtaacaatgtgcaacctaaccgtgcatctgtgggctgtactgctaaaccagagctcggcgatgtttctgtggggcctaacgctccgatcccagatacagaggtctaccgctggacagatgctactctttaccatgcagatgttgcatcacgccatctacgcgcactcttgggtgttcgggtgggtcatcgaagtatgcttgtcagtcgggcttatgatgaacttgttaaccgtcatcgatacggttcacccgaaactgatcgcatacttgctcttcttcggatggaaaacgggcatgtgcgtagtgtgcgcttggttattgatatactcaatcaggagatggaactctatagtcgccgcggctccggccgcgggcgggtggaggtcagggtatcgaacaatgatgtcctccagtttgattgttatctttatcagtgtaggaattgcaggagttatcgcttcggactatggaggttatccggctgcggctgcggtgactgcagcattgttgataatgggaatcaaaatgtttgactttctgacgacccgattgtctcttgagttcgtatctgcaggcatgttccccgaaggtgttgaaaaagcctttgaaccggactcggtcagtgacttgtttagggcatctttcactgtagatgggataaagttgcaggaccatgttgaaccgatccccattttgtttgccattttgtacatctttattggagctgtggcctgtaaggttaacccggccctcggaatagtgtatgctatcgccatgttcgcgactcctttaccggagttaatgcgtttatacatgatgaccatctattcctctacatttcggacagacactctgcttgggatggctatcccagaaacggagccagaactgtctcaagactttgggccaatccctgatgggatttatcgggtgaacaatcatggattttcagtgaagagtcatcggggagttggaatcgtaaagaatggggtttttcacactctcatgcatgtcacgctcaatgagccactcgcgtggcaaaatcgcctagtaggaccttcaatgggccactctctcaaggactatgtcacatacggtggaaactggcaattgcctgactttgatattgttaatgaggtgggcataatggtttgtggacgggatcgttccattcagtacaaaagacacgaggttgggacaatcatgatcgacgacaagcgagtgatgtacttcactcatgattacgggcacggatcatctggttcaccaatttttgtgaacggagaacctgtggccttatacggcttcgggttccatttgtacaataggtatcgatcaatagttctgcctatcccacgtgaagaagtccttgatggggctagtaatgagggcataccagctgagcacggaaccatgcgcaacaagttttttgttgactggcatccaggaaaagggaaaacccgaaaagtgatcgttaaagaggtgttaaatgctttgaatttagcacggcggattgttgttctggcccctacacgagttgtcctggctgaaataactaaggcaataggggaaaacacatcaaaaacgccctcaaaaaatcttgctttcaccggtcacaatattgtgacggtggcttgccacgcgacgttcactgattatgttttgcgtcatgggttatcaaaattcaaagctcacgaagtcataatggatgagtgccattttctggacccacgatctatagctgcgagaggaatcctggagcatctggcaactaaacgtggagttaaagtcacgtttatgagtgcaacgatcccaggacgtgaaccttcactcgggtcgaattttgagatctctgaacaggccttgcagtttccccgtgacgtcaaccaaaggtggatagaaactgttgctaggggaaagaccgttgccttcgtgccatctcacagggtaggtgacaagctagctcgcgggtgtccccaagccatttccctgcataggaacaattttgacaccaattacagcacagctatggatgagtccataaaatttatctacaccactgacatatcggaaatgggagccaatttcagtgctgacaccgtcatagatttccgggtggcgattaagccaaagatttctagtgaatttgccgtcactcttgaaccaactccgatcacgcgatcatcgatgattcaacggcgtggtcgagttggaagacaacgacctggaacctatatttacccagttgacaaaggcgtcgaagatgcctccgatcagttggcttgttggacagaagctcagatgttgttggatcaattggacttgacaatgatggcagaggaagttcggcagtcaaacattccaggggcttacaaattagttgggcgtagcctagacatatttcggaagttgctggagaaggatgacataccaatctggctgagctggaagtgggccgacagtgttcaacaacaatactccatattgtttgaaggagaacgtcaagagaatgtcgctcgtgtcgtcaacactcgagactatgcttctctagagtataagccgaagtttgttgatgcacgattcgagcgtcttggatgggatcaacgaaagctgtcaattcagttttacatgaacactcggagcttcataactttcgccactttgtcacacgtcatttctcaagtgatcgaagctggagttgtcaattctgcttggaagcgaataggagacgttagcatcatctttactgaaggaggcgacccacatgctaaagatgaaactatcatggcttggactattctggttggaggagtgttgggggctcttggattcctcatagttgcatggggaatgaaggctgtcttgcgagtaattttcggatcccgcgataagcatcttagcgtcccaaccttagtggcggatttccaaccatacatagtgtgtatagttcccattgccctacatcttgctggggttcctataccaatgacaattgtgtttttcgcgatgcttttcttgacttatccactaatgtacaagagtgccggacaacggagttatgttgacattgacttggtgaaatggattctgttaggtggatgtattgtaactggagtcatttgctgggaaatgagattgctcccaaacatctcatcagacatttcagctattttgaataggcaaagacaaagggaagacaccccaacttttgatgcttcaccaccttgggaatggttggatttagcacagccagtccctcacaatgttgaattgacgtcagtggtgataactacattcacgacctgtctgttcttgcaccaaattgtcggatggtcatacgagtcagagtggctgaaatcctatttcgaccacaaaggagtgggtcagatcatgggtggttttcggttggacacaatttcatggggatcagctctaagcggtcttctgggcacagctacttatgcctcatggggagccattttgactgggttaggaggagcggttgtgtattttttcctgatggtttcaatgctcaagtggaacttttcgggaggagccacaactggcttagaaaacaatgtcatgcgaaacgaccgagaaactggactaggtaatcggccggcaaacgacaataggcgttccctcctgtacggtgtggtggcggctgaatgtcttgtgtggttgttctgtttcagaactgccacggatgccatagtggtggcttgtttagtgtcctattgtttatggatcatcaacaacccggctagccctcaccacaaaaacactgacttaggatcggcgtgtagtttcatcggtcttttgtactgtacatgtcctactcaaaaatgcatccaagtattgatgaggtttgctttggccaggttgaacatgaacacccgctctctggaaaaaagcgcgacgggaggccttggacaccgttggaagaagctattaaatgcgatgacactattggaattcaacgcttaccgatcttgtggagttgacgagactgagaagggtgactatgtgtcacgaggagggctgaagctgagagagataaccatgaagtatggttggaagccagaagggatatgtgttgatcttggatgcggcagaggaggatggtcacagcacttggctatggatccccgcgtaactagagtggaatcattcacgttaggaggaacagcacgagaaaatccccagccaatcaagacacttggtcataaccttatccggttcaagagtggagtcaatgtgtataatatgacgccaacacatgctaacaccatagtgtgtgatatcggagaaagtgaccccaaaccagaggtggaaacctctagaacattgcgggtcctcaaaacacttgaactatggttggccaggaatccaaacgctgaatttgtgtgcaaagtcctttgcccataccccgtggaagtcctcaaatgtctggaaacccttcaacataagtatggcggaagaattattaggtcgacgtatagccgaaattcaagtgctgaaatgtattacatttctggaggccgtaacaacatggtgaaggttatcttcaccaccctccactccttgatttcgaggatacgaactaggccggagaaaatcgtcaaagaaagtgtttctctaccagttgggactagaagcgatccagggcacaagatcaagagtatggatccaaagatgatagcaacgcgggtggaaaagataaaaaaggaacatgcggacacgtggttcgttgacaacaaccatccataccaatcatttcggtatgtgggatcgtacgtcacagatgatgtgacaccaggaggtcagactgtcaacccattaatgagaaaaatgatgtggccgtgggagactgttggaggagttgtaaatttcatgatgacggacgtgtccacatatgcccaacagaaggtgttgcgagagaaggtcgacacactatcccctgaacctccaaacgacattcaaagggttaacagatggatcaccgagttcttgtgtgcttcattcatgcgtcgagggttgaaacctagaatcctgaccatggagcaatatatcaacaacgtaaagagctcagctgccattggatcgtggagcagtgatgtcccgtggagcagtgtccgagaagctttagctgataaaagattccaccaaatggtcgaggaggaaaggaaactccacttagcaggagactgccgcatgtgcgtgtacaacaccatgggcaagaaggagaagaaaccttcagccatgggcgtggccaagggctctcgaaccatttggtacatgtggttaggttcacggtttttggagtacgaagcccttggcttcttaaatgaagatcattgggtgtcacgagacaacttggcatgtggtgttggtggagtgggagtgaattacttcggctactacctacaagaaattgcacggaaagggaagttttttatcgccgatgacatagcgggatgggacacgcggatcaatgagagtgacttggccgatgaggaatttctcatcatgtccctcatttgtgacccataccatcgatcacttgcaaaagccgtgtttcggtttgcctaccagaacattgtggccttgtttccgcgaaatcatcctgggtttggaagtggaacggtgatggatgtcgtggccagaactgaccaacgaggttcaggacaggtcgtgacttacgctctaaacacgataacgaacgccaagattcaattaggcagaatgctggaagccgaaggattactagacgctcatgaacatgtaatcaaaaaatggttaaacgacaatggtgaagaggctctctccgggatggtggtggccggggatgatgttgtagttgcgaccaacaacggaaatttttcaaggtccttacgatacctccatttgaacgggaaaattcgtaaagacattgatccgtccctaccgtccaaagttgaaacgaactgggaggtggttgaattttgttctcaccattaccacgtgatgaccttaaaggacggacgacgaataattgtcccatgccgagagcagaatgaaatcattggacgaggcaggattcaaaaaggagggttggtgacccttgccgaaagtgcctgcctagcgaaggcttatgggcaaatgtgggctttgtatttctttcaccgaagagatctgcggatggcttttctagccataacttcgagtgttccaatagactggttcccagagggccggacctcgtggtcgattcaccaaaataaagagtggatgaccactgaggacatgttgcgggtctggaatacagtgtggatccaggacaatccctggatggaggacaaaatggaaatcgaaaattggagggacattccgtacctcccgaaatccatggacctaaagtgcggcagtctcattggaacaaaagaaagagccgcttggtcaaaggatctgccgtcaacggtcacggcagttcggaaaattatcgaccaagacacgaaaaccgagaatgtctaccaagactttcttggcggaatgggccggttccaaacgtacactgaccccatggcaacgtaagaaaccatcttttccaaattagtcgaaaaattttgcccctcttcgaggggctttggcggcagcaggagattttctccggggtttcacgctccccccgatgccagtggtcacagcccaagtcagagacttggagttgtggcgggacagtgagctctgtcagtggtcaatagctcaataaatatggcagcagagcttgtctcggggattcacgctccccccattgtgagtgtgtcgaactggtttcgaaggacgtctagaacgacgctaaagttcaaatccggcaacagagagtttatgtctcggggcctcacgcaccccccgttgtgagtgaagtcctttctggccatttagtggtcaggaagggtaccgttttggaacgacggaaataagttccatggagcgacactagccccactgaggggcggttggaatgacacccaacccgctatagtgcgtcgacaggtcaattagctacctggaataagctaatgtgcagggcaacaaagttctaacgaactagggtgagtagcgtcaccccccggttgtgaaaacgattgcgactagaactaaagtcgagagtctccccaccgataggggagctcgtcagtttgttttagtccaattacgct

SEQ ID NO: 38 - DNA, 11980 bp, Artificial Sequence
  synthetic
gggtcggcatggcatctccacctcctcgcggtccgacctgggcatccgaaggaggacgtcgtccactcggatggctaagggagagccacttttctctcgattctctatcggaatctagggagctcggatccagacatgataagatacattgatgagtttggacaaaccacaactagaatgcagtgaaaaaaatgctttatttgtgaaatttgtgatgctattgctttatttgtaaccattataagctgcaataaacaagttaacaacaacaattgctcgagggggggcccggtaccttgaagctgtccctgatggtcgtcatctacctgcctggacagcatggcctgcaacgcgggcatcccgatgccgccggaagcgagaagaatcataatggggaaggccatccagcctcgcgtcggcgcttaaggatcatgatgataaacaatgtatggtgctaatgttgcttcaacaacaattctgttgaactgtgttttcatgtttgccaacaagcacctttatactcggtggcctccccaccaccaacttttttgcactgcaaaaaaacacgcttttgcacgcgggcccatacatagtacaaactctacgtttcgtagactattttacataaatagtctacaccgttgtatacgctccaaatacactaccacacattgaacctttttgcagtgcaaaaaagtacgtgtcggcagtcacgtaggccggccttatcgggtcgcgtcctgtcacgtacgaatcacattatcggaccggacgagtgttgtcttatcgtgacaggacgccagcttcctgtgttgctaaccgcagccggacgcaactccttatcggaacaggacgcgcctccatatcagccgcgcgttatctcatgcgcgtgaccggacacgaggcgcccgtcccgcttatcgcgcctataaatacagcccgcaacgatctggtaaacagtagttcgcctgtgtgagctgacaaacttagtagtgtttgtgaggattttgaacaattaacacagtgcgagctgtttcttagcacgaagatctcgatgtctaagaaaccaggagggcccggcaaaagccgggctgtcaatatgctaaaacgcggaatgccccgcgtgttgtccttgactggactgaagagggcaatgttgagcctgattgacggtagggggcccacacggtttgtgttggctctcttggcgttttttaggttcacggcaattgctccgacccgggcagtgctggatcgatggagaagtgtgaacaaacaaacagcgatgaaacatctcctgagtttcaagaaggaactaggaaccttgaccagtgctatcaaccggcggagctcaaaacagaagaagagaggaggaaagaccggaattgcattcatgattggcttgattgctggcgtgggagcagtcactctctccaactttcaagggaaggtgatgatgacggtgaacgctactgacgtcacagacattatcacgataccaacggccgctggaaagaacctgtgcattgtcagagctatggatgtggggcacatgtgtgatgatactatcacctatgaatgtccagtgttgtcggccggaaatgatccagaagacattgactgctggtgcacgaagttagcagtctacgttaggtatggaagatgcaccaagacacgacactcaagacgcagcagaaggtcactaacagtgcagacgcatggagagagcaccctatcgaacaaaaagggggcctggatggacagcaccaaggctacaaggtacttggtaaaaacagaatcatggatcttgagaaaccctggatatgccttggtggcagctgtcattggatggatgctcggaagcaacaccatgcagcgtgtcgtgtttgccgtgttactgcttttggtagctccagcttacagctttaactgtcttggaatgagcaacagagatttcctggagggagtgtccggagcaacatgggtggacttggtccttgaaggtgacagctgtgtgaccattatgtccaaggacaagcccaccatcgatgtgaagatgatgaacatggaggccgctaacttagcagaagtccgcagttattgctacttagccactgtcagtgaactctccaccaaggctgcgtgcccaaccatgggggaagcccataatgacaagcgggctgacccatcttttgtgtgcaaacaaggagtagtggatagaggttggggcaatgggtgcggactttttggtaaaggaagcatcgacacatgcgccaaatttgcctgttcaaccaaggcaacgggaaggactatcttaaaggagaacattaagtatgaggtggctatctttgtgcatggaccaactaccgtggaatcgcatgggaactacttcacgcaaaccggagctgctcaggctgggagatttagtatcacccccgcggcaccctcttacactcttaagctcggagagtatggagaagtaacagtggactgtgaaccacgctcagggatagacaccagtgcatactatgtgatgactgtcgggacaaagactttcttggtccaccgtgagtggtttatggacctcaacctcccctggagcagtgctgaaagtaatgtttggaggaacagagagacgctaatggagtttgaagaaccacacgctacgaagcaatctgtgatagcattgggctctcaagagggagccctgcatcaagctctggcaggagccattcctgtggaattttcaagcaacactgtcaagctgacgtcaggccacctgaagtgtagggtgaagatggaaaaattgcagctgaaggggacaacttatggcgtctgttcaaaggccttcagattccttgggactcccgcagacacgggccatggtactgtggtactggaactgcagtacacaggcacggatggaccctgcaagatacccatttcatcagtagcttcattgaatgacctaacgccagtgggcaggttagttaccgtcaacccctttgtctccgtgtcaacggccaatgctaaagtcctgattgagttggaaccaccctttggagattcgtacatagtggtgggaagaggagagcaacagatcaaccatcactggcacaagtctggaagtagcattggcaaagctttcacagccaccctcaagggagctcagagactagcagctctgggagacacagcttgggactttggatcggttggaggagtgtttacctccgtgggaaaggctgtccatcaagtatttggtggagcattccgctcattgtttggaggcatgtcttggataactcagggtctgctgggggccctcctattgtggatgggtattaacgctcgtgatagatccatagccctcacgttcctcgcggttggaggagttctgctctttctctccgtgaacgtgcatgctgatactggatgtgccatagatataagtcggcaagagttgaggtgtggcagcggagtatttatacacaatgatgtggaagcttggatggaccgatacaagtactaccctgaaacaccacaaggtctagctaagatcattcaaaaggctcacaaggaaggagtgtgcggtctacgatcagtttctagattggaacaccaaatgtgggaagcagtgaaggatgaactaaacactcttttgaaggaaaatggtgtggaccttagtattgtggttgagaaacaggaggggatgtacaaatcagcacctagacgcctgactgccaccactgagaaactggaaataggctggaaagcctgggggaagagcattctgttcgcaccagaactggccaacaacacttttgtgattgatggtccggagaccaaggagtgtccaacccagaaccgtgcctggaacagcttggaggtggaagattttggattcggcctcaccagcactcggatgttcttgagggtcagagaaagcaacacgactgaatgtgactcaaagatcatcgggacagccgtcaagaataacttggcgatccatagcgatctatcctactggattgaaagcaggtttaatgacacgtggaagctcgaaagggcggtcctaggtgaagtcaaatcatgcacgtggccggaaacacataccctgtggggtgacggggtccttgagagtgacctaataataccaatcacgctagcgggactgcgaagcaaccacaaccggaggcctgggtataaaacacaaagccagggtccatgggatgaaggtcgagtggagattgactttgattactgtccagggacaacggtcactctgagtgagagctgcgggcatcgtggacctgccacccgcaccactacagagagtggaaagctgataacggactggtgctgtaggagctgcaccttacctccattgcgctaccagacagacaatggttgttggtatggcatggagattaggccacagagacatgatgaaaaaactcttgtgcagtcacaggtgaatgcctacaacgctgacatgattgatccttttcagctgggccttctggtcgtgttcttggccacccaggaggtccttcgcaagaggtggacagccaagatcagcatgccagccatactgattgccctgctagttctagtgtttgggggcatcacttacactgatgtgttacgctatgtcattctggtgggggcggcctttgcagaatccaactcaggaggagatgtggtgcatctggcgctcatggcaaccttcaagatacaaccagtgttcatggtagcatcatttctcaaggcgagatggaccaaccaagaaaacattctgctgatgttggcagctgctttcttccaaatggcttactatgatgcccggcaaattttgctttgggaaatgcctgatgtattgaattcattggcagtggcttggatgatattgagagcgataacgttcaccacaacatctaatgtggtcgtcccgctgctggccttgttaacacctggattgagatgcctaaacctggatgtgtacaggatcctgctactgatggttggaataggcagtttgatcagggaaaaaagaagtgcagctgcaaaaaagaaaggagccagtctgctatgtttggctctagcctcaacaggattttttaaccccatgatccttgctgctggacttgtcgcatgtgatcccaatcgcaagcgggggtggcctgcaactgaagtgatgacagctgtcggcttaatgtttgccatcgttggagggcttgcagaactggacatagactccatggccattccaatgactatcgcagggctcatgtttgctgcttttgtgatctctggaaaatcgaccgacatgtggattgagaggacagcggacatctcctgggagggtgatgcggaaatcacaggttccagtgaaagagttgatgttcggcttgacgatgacgggaacttccagctcatgaatgatccaggagcaccttggaaaatatggatgctccgtatggcttgcctggcaatcagcgcgtacaccccttgggctattttgccttcagtagttggattttggataactctccaatacacaaagagaggaggtgtgctgtgggacactccctctccaaaggagtacaagagaggggacacgaccactggtgtctataggatcatgactcgtggattacttggtagttaccaagcaggagcaggcgtgatggttgaaggtgttttccacaccctctggcacacgacaaaaggagccgctctgatgagcggagaaggccgcctggatccatattggggcagcgtcaaggaggatcgactttgttatggtggaccctggaaactgcagcacaagtggaatgggcaagatgaggtgcaaatgattgtggtggaaccagggaagaatgtcaagaacgtccagactaagccgggggtgttcaaaacacctgaaggggagatcggggccgtgactctggatttccccactggaacatcaggctcgcccatagtggacaaaaacggtgatgtgattgggctttatggcaacggagtcataatgcccaatggctcatacataagcgcgatagtgcaaggtgaaaggatggatgagccggttcccgccggattcgaacctgagatgttgaggaaaaaacagatcaccgttttggatcttcaccctggtgctggtaaaacaaggaggattctgccacagatcatcaaagaggctataaacaggaggctgaggacggctgtgctggcgccaactagggttgtggccgctgagatggctgaagccctaagaggattgcctatccgataccaaacatctgcggtggccagagagcacaatggaaatgagatcgtcgacgtcatgtgccatgcaaccctcacccataggctgatgtctcctcatagggtgcctaattacaacctatttgtgatggacgaggcccacttcaccgacccagccagcatcgcggctagaggatacatttccacgagagttgagctgggggaggcagctgcaatattcatgactgccaccccaccaggtacctcagacccatttccagagtccaatgcaccaatatccgacttacagaccgaaatcccggaccgagcctggaactcagggtatgagtggattacagaatatatcgggaagacggtttggtttgtgcctagtgtgaagatgggaaatgagatagccctctgtctgcagcgcgctggcaaaaaagtcatccagctaaacagaaagtcgtacgagacagagtatccaaaatgcaagaacgatgattgggactttgtcgtcacaacagatatatctgagatgggagcaaactttaaggcaagcagggtgattgacagccggaagagtgtgaaaccgactatcatcacggaaggagagggaagagtgatcttgggggaaccatccgctgtgacggcagccagtgcagcccagagacgaggacgcattggtaggaatccatcacaagttggagatgagtactgctatggagggcacacgaatgaggatgactcgaactgtgctcactggactgaggcacgaatcatgctcgataacatcaacatgccaaacggattgattgctcaattctaccaaccagagcgcgagaaggtatacaccatggacggggaataccgacttagaggagaggagaggaaaaacttcctggaattgttgagaactgcagacttgccagtatggctagcttataaggtggcagcagctggggtgtcatatcatgaccggaggtggtgttttgatggccctaggacaaatacaatccttgaagacaacaatgaagtggaagtcatcacaaagcttggtgaaaggaagattctgaggccacgctggattgatgcaagggtgtactcagaccatcaggcgctgaaatcattcaaggacttcgcctcagggaagcgctctcaaataggttttatcgaggtccttggaaagatgcctgaacatttcatggggaagacatgggaagcactcgacaccatgtatgttgtagccactgcagagaaaggaggaagagctcacagaatggctttggaggagctaccagacgccctccaaacaatagctctgatcgctctgttgagtgtgatgaccatgggagtgttttttcttctcatgcagaggaagggcatcggaaagataggcctgggaggcgttgtcctgggagccgcaacctttttctgttggatggctgaagtaccaggaacgaagattgccggaatgctgctgctttccctccttctgatgatcgtgttgattcctgagccagagaagcaacgctcgcagacagacaaccagctagctgtgttcctgatttgcgtgttgacccttgtgggtgcggtggcagccaatgagatgggttggctggacaagaccaagagtgacataagcggtctgtttgggcaaagaattgaaaccaaggagaattttagcattggggagttccttttggacctgaggccggcaacggcttggtcactgtatgctgtgactacagcagttctcactcccttgctaaagcacttgatcacgtcagactacatcaacacctcattgacctcaataaatgttcaagctagtgcgctattcacgctcgcgcgaggcttcccttttgtcgatgttggagtatcggctctcctgctagcagccggatgctggggacaagtcactctcaccgtgacggtgacatcagcaacacttctgttctgccattatgcctacatggtacctggatggcaggctgaggcaatgcgctcagcccagcgacgaacagccgctggaatcatgaaaaacgctgtggtagacggcatcgtggccacggacgttccagagctagagcgtaccacacccatcatgcagaagaaggttggacaagttatgctgattttggtgtctcttgccgcattggtggtaaacccgtctgtgaagacagtgcgggaagccggaattctgattacggcagcagctgttaccctctgggagaacggagcaagctctgtgtggaacgcaacaaccgccataggactttgtcacatcatgcgcggaggctggttatcgtgtttatccataacatggactcttgtaaaaaacatggaaaaaccagggctgaagagaggtggggcaaaaggacgcaccttgggggaggtttggaaagaaagacttaaccagatgacgaaagaagaattcatcaggtaccgtaaagaagccatcactgaagttgaccgctcagcagcaaaacacgctaggaaggaaaggaatatcactggagggcatccagtttctagaggcacggcaaagctaagatggctggtcgagaggaggtttcttgaaccggtcggaaaagtgatcgaccttggatgtggaagaggcggctggtgttattacatggccacacaaaaaagagtccaagaagtcagagggtacacaaaaggtggtcccggacatgaagagccccagctagtgcagagctatggatggaacattgtcaccatgaagagtggggtggatgtgttctataggccttctgaatgttgtgacactctcctttgtgatatcggagagtcctcatcaagtgctgaagttgaagaacatagaacgctacgagtccttgaaatggtggaagactggttgcatcgagggccaaaggaattttgtgtgaaggtactgtgcccctacatgccaaaggtcatagaaaagatggagctgctccaacgccggtatggcgggggattggttaggaacccactctcacggaattccacacatgaaatgtattgggtgagtcgagcctcaggcaatgtggtgcactcagtgaacatgaccagccaggtactcttaggaaggatggagaagaagacctggaagggacctcagtacgaagaagacgtgaacttgggaagcggaacgagagcagtgggaaaacctctactcaactcagacaccagcaagataaagaacaggattgaacgacttaggcgtgagtacagctcgacatggcatcatgatgagaaccacccatatagaacctggaactaccacggtagctacgaagtgaagccaacaggctctgcaagctcactggtcaatggagtggtcaggctcctctcgaaaccatgggacaccatcacaaatgtcaccacaatggccatgacggacaccaccccttttggacaacagcgagtgttcaaagagaaggtggacacgaaagctccggaaccgccagaaggagtgaagtatgtgctcaatgaaaccaccaactggttgtgggcgttcctggcacgagaaaagcgtcccagaatgtgctcgcgagaggaatttataaggaaggtcaatagtaatgcagctctgggcgccatgtttgaggagcagaatcaatggaggagtgctagagaagcggttgaagatccaaaattctgggaaatggtggatgaagagcgtgaggcgcacttacgcggagaatgtcatacttgcatttacaacatgatgggaaagagggagaaaaaacccggagagtttgggaaagccaagggaagcagggccatctggtttatgtggctgggagctcgcttcctagagtttgaggctctgggctttcttaatgaggaccactggcttggaagaaagaactcggggggcggggtcgagggtctgggcctccagaaattaggctacatcctgcgtgaagttggcacccgacccggaggcagaatctacgctgatgacacagccggttgggacacccgcatcacaagagctgacctggagaatgaagccaaggttcttgagttgttggacggggagcaccggcgcctggccagggccatcattgagctcacctatcgccacaaagtagtgaaggtaatgcgcccggctgctgatggaagaaccgtcatggacgtcatctccagggaagaccagagaggaagtgggcaagttgtcacctacgctctaaacacctttaccaacctggctgtccaattggtgagaatgatggaaggagagggtgtgatcggcccagatgatgtggagaaactcacaaaggggaaagggcccaaggttagaacctggctgtctgagaatggggaggaaagactcagccgcatggctgtcagtggagatgactgtgtggtaaagcccttggatgatcgctttgccacctctctccactttctcaacgccatgtcaaaggtgcgcaaggacatccaagagtggaaaccatcaaccggatggtatgattggcagcaagttccattctgttcaaaccacttcactgaactgatcatgaaagatggaagaacactggtgactccatgccgagggcaggatgagttagtgggcagagctcgcatctccccaggggctggatggaatgttcgagacactgcttgcttagccaaatcttatgctcagatgtggttgctcctgtacttccacagaagagatctgcggttgatggccaacgccatctgctctgccgtacctgtaaactgggtccctactggaagaaccacatggtccatccacgctggaggagagtggatgacaacggaagacatgctggaggtctggaatcgtgtctggattgaggaaaatgaatggatggaggacaaaaccccagtggagaagtggagtgatgttccatactctggcaaacgagaggacatttggtgtggcagcctgattggcacaagagcccgggccacgtgggcagaaaacattcaagtggccatcaaccaagtcagatcaataattggagatgagaaatatgtggattacatgagttcattgaagagatatgaagacacaacattggttgaggatacagtattgtaaatactttgttaattgtaaataaatattgttattatgtgtagaagtttagctttataatagtgtttagtgtgtttagagttagaaaaattttagtgaggaagtcaggccggaaaattcccgccaccggaagttgagtagacggtgctgcctgcgactcaaccccaggaggactgggtgaacaaagctgcgaagtgatccatgtaagccctcagaaccgtctcggaaagaggaccccacatgttgtagcttcaaggcccaatgtcagaccacgccatggcgtgccactctgcggagagtgcagtctgcgacagtgccccaggaggactgggtgaacaaaggcgaatcaacgtcccacgcggccctagctctggcaatggtgttaaccagagtgaaaggactagaggttagaggagaccccgcgttctgaagtgcacggcccagcctggctgaagctgtaggtcaggggaaggactagaggttagtggagaccccgtgccgcaaaacaccacaacaacacagcatattgacacctgggatagactaggagatcttctgctctgcacaaccagccacacggcacagtgcgccgacaatggtggctggtggtgcgagaacacaggatct

SEQ ID NO: 39 - DNA, 10732 bp, Palm Creek virus
agttttaaaaaacttttgcgttagtaaaaccacggagttttggtttgctgagaatagtgcgagggttgttttaattatttcggagattttggttcgtgatgaatcaggagagaggaatactcaggggtatggggaggttcccccccccccctgtgaagaaggggaacaagaattctgttgccgtggccagggtgccaccgcagcaaggaggaaaagcgagagagaaaaaccgtgagaggattaaagcgccaggagcgcgacatggagttgccggaaagatgaaaagtctaatgggagaattgggctttggatggattgatttactacgcgttgatttggtggaaggaattatgatgatggtttttgttatacagcgggctttcgcccaagtgcaccggagaattagaggattatcaagacgcgtcagggcattggagaagaagcgtgacggtcgagcggctatgttcatttggactatattggcaatgttattcggagttatgggagttgtggtgattgacatgcgtgtgacgtatgacggacaagtgcagatttatcgcgacggagagaatatgacagatcgagttgcgctctttaagctgccaactgacggttgttcagttgggttgccagtttcaaagatgtgccacaaagtggataaaaacatgaaagaaggattagcggacacggattgcggatcaacatgggcagagtttaggttgagataccaacgatgccaagtgaagacacgagcgaagcgagttgcgccagatggcccaaagcaagactttttggcagaagtggaaatagtggcttttaaagccatccgggaaaacaaaagtgtgttgcttgtggtcgtgttgtgcgtggccatcgcgaaaagatggccattgtgggtgttgatactactgtcgattggaacatggacaacggttcgaggagaatacatggaaccgttgtatgtattgaaagcagaccagatgacaatgattcagacaacgttgaggccagaagagggatacgtgacagcgacggcaaatgggttatttgagatgaaaacaggaagagcgttcatctatggaagccaagtggtgaaaacactggtaactgactgtgaagttaacgcgacatattcaactgatatatgcccaggcggatcgcagctgtcaatgcaggacattcaagcggaaggaagagcatgtgcctcggagccgtataatcgaggctggggcactgggtgttttaagtggggagttggattcgtagcaacatgcgcggaggttgattgcaccactagtgtgaaagttagctcagtggctcgctcgacaattaagatgaatgtgacggcaacataccactcagtgaaaagtgtgcagagtgtgataagtgatgtacctgtgacattccaatttgggcagctgggcattgcctctatgacatgtcgtttggagtccgaccgaattgcccaatcatactatcacgtggaaggaaacaagaaggagggactattcatgaaggaacagattgatggatggaacggagccacgttggctgctggaaagatagccaacacagagaaaattgttatttggggagatgtgaaaccaaatgaaattttggttaaggcggtttcagaaccccaactggaatggactaatgctatagctacacatgatggcttccgagatgtgggatttgtttgccagataatgcttgacaagcttgttaccggagtgtttaaagattgtaagacccctaaaacgtccacattcacacaaagcggatttggctttgacggaattataactaccacgttagctgtcgcccaaactgaagcctgctcgatcagcatctcctgtaaaggatgcacgcttttggcaacaaaagcagtgttttccgctggggatattgagtcgaagacatgggtgcgatgcggaaacgagagtggaacagcgatcgttggaggacaagaagttgccgttgcgtgcgccacaaatcccatcacgcagggatggagattggtgaagcatgctactcaacgttaccggaagtttggaatgccaggagtaggtggagtattccacgatttagtgggaacattaaatccatggagtttcttctctaccacgactctggttttcatggcggtagtccttttcatcgtggacaaaagaatcttgattttggggatagcttgttatatgttttattttgtgcgagccgacttcggatgtggatttgacccagataggaaggtagcacagtgtggttctggctcattcgtgtggaagtcactggcccgttggccaatggctgatcacgctattgagtttgaagatagcaaagtgatggtgacttacttgactgacctattgatgagaaagaacaaagtctgcatagtgtgtgaagatgtattgcagtgtgccgcagcgcgtggagttgtcgagcagataacgtcgatcaatggaatcccaatccatcacaacatgtcgctgtcgcatggccgatatttcccacgtgtagtgaagaaagtacacaatgttaaggtgggaaaagccatgttgcgccttgcaatggccacatatgcgggagcgatgcctgagagtggattgggtgttttgaagacggggtatttttcacgcggagaagtgcaggaaacgtgggatgataaagttctaagagtcctaaccagcgccataaatgcagaggaagtgtgccagacggctgtcacgttccagtatgagttcgttcgatataaccggaaagtctttggatctaacatcgtgttgcgaccttcagcctttacgagcaaagcttgcccaacatatttagctggggctgtggtcaaaaacgacatagcaacgtttacggacggaatgatgtggatgcggagccggaaagtcaatgaaacgtgggaactgtttgagttggaaacaacccaaagccaccaatgcatttggccatacgcgtacacaatagacctagcaacacccacggacaagaggcttttcatgccgccacaatacggaggaccaatttcgtttgcgaaccacgtgcctggattccaggtgcaagaggactttccctggcagaaggcgaatatattaatgcgccagggaccggttccgggaacgaccgtagtccaggatccacactgtgatgaccggagcgcggcagtgccagttgaaccaactatgcaagcttggtgctgcaagacctgttttgatagaggagtgaagcctttccattttgtggttgacgggaaatttttctatccaatggaagtgcggccaatgaaactggaacaagacgctgtggtgattgagactgatgatggagagttcgagaggagtgagcatgagagcttgtttgaaggcaaagcaaagtggacatcaccgttaccaatgggagaaacagccaagattcaaaattttttcgtgaccagcccgccaaagccggaatcaagcctgcttttggtgggcgttctgattcatatgttaacaacgcgaacccgccatcggtgggcaactcgttgtgctggaacttggctcatctttttggtctttggacatccggttgtgtcttcggtgcagtcttgggcgtggctctttatgtcagctgccttagcaagtgtccctggtggttcttcactggtgatccacttctggattgggttgcagatatcgtcagcgcacctcttttacctgggttggttaatgaggaaacgcctgttgattacagagatgtcgcgagtggcacatctgattgcccagttgtgcagcttcgagacatatgcgtgggcaccgatcctcaaagtactggatcacttgctgtttccactctacactctgtcagtattcgtcgttcaccagcagtttcaggtattccacgacttgtggctacagagcgccgtggtgatggcacacctgttgcaacaccctctcagtggtttaataaccttgagtttaagcgtcggcttgattcagctaatagcaccaatgaaaagatggttttgctcaccagttatatggggagatggcttacgcgcgccgagaccacactggacagccttaacgtatttcatcgtgctgtatttggcagccgctgggatggagacagtgggtctgcacacgtccgggatgacagtgatgctgggcgggatgcttctgtgggttgtcctacagttgatgcccccgacagccttggaacttgtgcgcctaccgggacaaagtctgccagacggatgtgaagaagaagcgtcaacatctctaccagaaggaatgagtgggcattacgcccccgatggagttgaactcgtgaactacacagatgcagggactgtctccgcaaaccttgtggtatttgttgggtgtgctggaattatgactatgaacatatacgttgggttggttatcacggccttggcctgggtaacggacgccccgatgtggattccaagattgattgatggtgctatgtcccagcgggcaaattcggagctattgctgccatccccacctcttgagatacacaagacggaagactcgtttggttacatcccggacggaacatatcacgtgttggctagcagctggatgagcaagaaaccagttggtgttggagtggtgaaggagggcgtgtttcacacgttacaccacgtcaccaaaggagctaatgtgacatgggcaggacgtgaggttaggatgcactctggagatgttaggcgggatattgctgcctatggcgggccctggaacatcagcgggagtcttgaagatgtcgtagtagtgaaggccgtgaacaaggatggaaccgtgacatgctgccggattacaacagctaagttggacattgaaggaactacagtgatggctgttgagcgagattttggtttcggctcttcggggtcccccatatacgctcctgatggacggttgattggcttgtatggatacgggttttactatggaacgtacttctcaatagtttcaacaggagaaggagtggaggcaccaccggaagaggttgaagtctcaacacgtgagtttgtggactggcaccctggaagaggaaaaacgcgcacgatactcgttgagcaggccctgaagcatatagctgatggaaagaggttgctaattttgacaccaacgcgggtcgtaaaggatgaagtgcagcgagcgataaaggaagccgccccgcaggcggttatcggatcgaacttaagcatttttcggaagaacgccgttaccttggcatgccacgcgaccttcacgcagtatgtgatggagaaggggatagaaagtgtgaagttttcgaccatcattatggacgagtgccactttctggacccgatgtccatcgcgtgccgcgggataatggatttccacaacagccgtggaacgaaggtcatcttcatgagtgcgacgcccccaggacgagcaggaaacgctgggtccaactttacaatagaagacagagccatcaagttccccaaggagttgaccgcatcgtggatcaaagacaagtcaataggcaagaccatcgtttttgtgccaacaattacgcaagctgtgaggctggctaaagagttgggaggggtggccttgacccgagatacgttcaatgatgccatggggaaggcccggagtccggaaacaatgtttataatctcaacagacatcagcgagatgggagccaatctcggagtgactactgttatcgacacaagaactgttataaaaccattagtgtctgacaaaggagtttcacttgaaagggttggtgtgaccccagcttcaatcatccagcgcaggggccgagtaggtcggcgggagcccggagtatacatttatccccttgacgtcgaaccagaggagcagccggaaaattgggtgtgttgggtggaggcgcaaatgatcttagatcaattgggctgccatccgatgagagaggagagcgaatttttccgcccacaaggcacgtaccggattgacgacgtagagcagcggaggtttctggggttgatcaaggaaaaactgccaatttggcttgcttggacttgggccagctcacatgcgaacaaacatcagatgctatttcagggaaacgcccccaacactggacgaacattaaaaataaagacgccatccggatctcacatttacgccccaaaggtgacagatgataggtttgaaaaggagccagaaattgtgaaagtggcggccatcggattcttcctaaagcagagatcactatacttcgacttacctggattattgaccggattgtacacggtgttgacaacggctgggctcgatgcccttggaaattcgttcaaacgctctgtggacacccttcacgacatcggaaatgcggtggaaggagagttttctgctatacaaatgggacggattttacagatgtggtctgcgttgtttatcggggtgactttgggagttgtgctgatgggagccggatttgttgtggtgaaggcttttagaggattgtttggaacccgccaacaacacacaactgtgtgcgtgtcggagggcggaagtttccaaaaagttgccacggttctaatgagcgttggaccattgtgcgccgtttttggtggcattccctctatattcgtcttcattgtgaccgttgccctgttgattgtgctgtgtgtgggcggaggtggctctcaacgtggtgtgcttgattcggatctaatacgctgggtcatggtgttggccatgatgacaatcggagtgactgcgtgggagttggagctattaccaaacgtgagaagagatgttatacagttgactcgatacctgtttgctagcaatcctgccgttgttggagctgtgtttaacgccgggaatatcggattgggagtctctctgccagggaccctcatgatgagctacgccgcgagcggaacgctggccccccttattggagcgtgggccgaaggaaatttcttaggaaagctctttggtagcgaagtgcttccagctcaggctataggcggatttcaagtgacagctatcccgtggggatctatggtgccggttatcgctggttgctttctagcgacaaacactctttcgaaagtgtttggtgctggaattacaactgtgtttctcatactactctacttcgacaagaaacatgcattcacgaacaaggctgttaaggttttgttggcgcggacaaacagaagggacatggaggaagaaatcacaacaagggacgcggagtcgcgggctcgccaactgttttatggcctacaactggccgtatcgttgctgtgggttctctcacatcctgtgttggaaaacttcgttccattctttgctgtgtgcgggtacacattcctgtcgctcttgaggccaaatcatcaactacatgctgcgttggattatacattggtagtcctgctcttgcaggtagttgaacctgggaacatcatgtacgtcggcggatgcgttttgttatggtatgttttaaaccctaccagattgggcgtgcgctcgctggtgaagagtgacaccggaggtttaggcttccgttggaagaaagcgttgaattcacttagtgagaggcagtttgccatctacaaagtcagaggcgtgaatgaaactgataaaggagcctacgtgtcgcgaggtggtttaaaaatgaacgagattatcaacaagcatgcgtgggaacctcgaggagttgtcgttgacctgggatgtggacgaggaggttggtcccagcgcttggtgatggattaccgcgtcgctgaagtaagaggatacacacttggaggcaaagaacgtgagaatccccaaccgttccaaacgaaaggatataacttggcgaatttgaaggctggagttgacgtctataaaatggagccagtgaattgtaacaccataatttgcgacataggtgagagtgacccgcgtcctgaagttgaaaaaactcgaacgctgaaggttttgggaatgctggagaaatggctggaagtcaatccaaacgcctctttttgctgcaaagtgctatcaccttatcacttggacgtgcttcgaaagttagagtcgctgcaacacaagtataacgggcggctggttcgactgtcttacagtcggaactcaacagcagaaatgtattatgtgtcaggaaagagggcaaacgtggtggcaagcgtgtacttcatgcttgggtcgctggtaggtaggctgcggagacatgagccatcaatcatcgaccccccaccggttctagagatgggaaccagaagcgatccgcgagcaaaggccaaagcgcaagacttcgagatgatccgaagaagagtggaacgactacgaggagaaaatcggaaaacatggtttgtggacaacgaacatccatatgtgtcatttaactaccatggatccttcgtgactgatgaggtgacagcgggcggacaaacaacaaatcccttgattagacgcgttatgtggccatgggactttctgtctcgggtgacaacctttatgatgaccgatgtttcaacgtatgcccaacaaaaggtgctgcgtgaaaaagtggacactgtctctgaggagcccgacgagcgaatgaaagcaattaacagactcatcatgacacacttcgtgaaaatgttcaagcggcgcgggctgaaaccgagggtgttgacaccacaagactacatgaataatgtccaagccaacgcagccataggaggatggagcgaagtaatggattggcaaaacgtgcgcgatgctttggcagatcaacgattctgggacatggtagataacgagagggccttacacttgcgtggtgactgtgagctttgcatctataacacgatgggaaagaaagaaaagaagccatctgcctttggcactgcgaaaggttcacgcaccatctggtatatgtggctgggtagccgttatttagagtacgaggctttaggattcttgaacgaagatcattgggttgcacgagaaaactttccatgtggagtcggtggcgtcggcgttaactattttggatattacctgaaggaaatagccgggggaggccggtggcttatcgcagacgatgtcgcgggatgggacacgagaataacccaaggagatctagatgatgagctgttcatgttaaccgagcttgccccaaccacataccacaagaaattgataactgcgacaatgacgttggcttataaaaacatagtggccttattccctagaaatcatccgatgtaccgaagtggaactgttcttgatgtgttgtctcgaacggatcagcgtgggtcgggccaggtgacaacatacgctttgaacactgtgactaatggaaagtgccaggtcgggagaacattagaagcgtgtggcttgctggacgccccgctcaccacaatcgactcctggctcactgccaacttggaacgagttcttggagcaatggtcgttgccggagatgatgtggtagtggcgacagacaatgaagaattccacacgagtttgagatacataacagcgacgtcaaagatccgaaagaacttaggggtgagtgagccatcgccgagattcacgagctgggaagatgttgagttttgctcacaccacttccatccactgacgttacgtgatggccgtgtgctgatcgccccgtgtcgtgaccaaaacgaaattatcggaagatcaagaatccagaaaggcggaatagttgacatggcctcggctgggtgcttagcgaaggctcacgcgcagatgtgggccctttacttcttccatcggcgagacttacggattggattcgcggccatcacatcaattgtgcctatcaactgggtgccgacgggcaggatatcatggtctatccaccagaacgcagagtggatgacgactgaggatatgctaacggtttggaacaacgtgtggattagggacaatccgtggatgagaggaaaagaacgagtgacttcatggacagacataccgtatttacccaaaggagtggacataaagtgcggaagcctaataggcgattccgaccgcgcttcctggtcaaagacgattcccctagttgtggagaagacccgaaaaatccttgagcaggagaggggaacattgaagttctacaatgggttatccattctaggacggtatgttcaccacgtcgatcctgtgttcaactgaagtgtgacgatgtaggcccgcgggagccttagaattcaagagcttgggaattctagaatcccgtttaccgcaggagggggtcatatggagcaggtggctatgtatagcctggctaaatgtatggctcctgggggagtgacgcccctccggttccagttcctgggtgaacaggtaaaaaccaccacgaagcgccgcttcaacatcgcaagggggagaaatcccgggtgctgacgccaccccgaccccagtcccacataaggctgtgacgaaagagccttaccggcacgaggagtgcccaccgcaaggaggagaaatcctgggcgttgacgacgccccggccccagtctctgataggtgaccagaaccatgtcaccccaaagtgttgaaaggacactgatcaccagaaatggtgagggcacacagggcttagcccaaggtgagtgacgacacctcccgaaatgtgtaaatagcagggtcagctctaagcagcaggcttccaccgttaggaagcgttgctgtgagcttacttggctacgtct

SEQ ID NO: 40 - DNA, 10848 bp, Binjari virus
agtatattttgcgtgtgcgtttcaaaacacagattgtattgaaagtacgtaagagtataacacgttggaataaagttttggatcaagaggaaaatcatggttacaaaactcaggaggcccgttaaacgggccgtcgatatgatgaggcgcgcggtaccccgcgccgcaggaccccggcgggtcctaactagggtatcaaataccgtgaagcgtaacgcaggcgctcttagagctcttctggcttatctgctgtaccagacattctctgggcggaaagttggtagtggtgctcggagcgcccttaagcgcttcaacaaaaatgacattgtgaaaatgttgctggcgttcagacggacattgacaaacatcatcacaaccatgcagcgtcgtgtgaaaggaaagaaacgtcgtggcgttcaagatgtgccgctattggtcttgctgctcgttggagcaggagcgatggctgccactttacgcaccgttggagacttgacatggctaaatgtgtcaaccactgatgttggaaagtggatacgtgtggagaataggcacggcaaaggagagtgtttcgtcacggccactgacgttggaacatggtgctcagactctgtgggatatgaatgtcctcaaattgcaccggcgtatgaccctgaagacttggattgctactgccgaaacacctcaacctacgttacttatggaaggtgtaaaaatgggcgcagtggacgatctcgcagcaagagagcaatcacgatagccccgcacggcgaagcaggattgcgtgttggaagcaccaagcattggacttctagagcaactccacaacggtatctaatgcgcgttgagaaatgggtgctgcggcatcctctacctgctctcgtgttggtggtactgggatggatgatgggtcgttctcacggccagagggccatgtatatagtgctgatgctgcttgtggctccgtcatatggtaaccaatgcctggatgtgcagtcacgtgatttcgtgcaaggggttagtggtggcacctgggtagatgttgttttggatcatgacaattgcataaccattgttgctgacgggaaaccatcttttgatattcgtttgtcgaaaatgagcatgtctaaattcgcagagtacaaacggtattgcctccaggccacgatgagtgatgtcactagcatagtggcgtgtccaggggctggggatgctcataatgacaagagcaaaaaccacgagtacatttgcaaagctgttaacaatgaccgcggatggggcaatgggtgtgtcctttttggcaaaggatcaatggaaacttgtggtaagtttgaatgtaagaagaaaatggctggcaagttagtggcacgtgagaacgtggaatcagtggtcactgtgcatgtacatggtgcctccgcaactgacacaaaaggagttgacaccgcctctacagccaaagcgactatcacgccaaaagcttctgtggctactctaaatttaaacgactttggtagcctggaggtggattgttcaactgatgttggcatggactttggagagattgtggtggccgacatgtcaggaaagtggtggatcgtgaacaaggattggttcaatgaacttgctttgccgtggtccacggctagcaccactgctgaagtttggcaggcacgagacagacttgttgagtttggatggccacatgcggccaagcagaacatctatgacattggggaccaagaaggagctgtgacggctgccatagcccaggcacccatggcgaaatgggagtctgacaaggtcgagctaatctctgggattctcaagtgcaaggtgaaacttggcaacctaaagctgcgtggggtgacctatagcatgtgtgcccagacattcaccacggaaacaaggccggccgacaccggacatggcactgtggctttcaaggtgaaatacgtcggaacagacgtgccttgccgggtcccactccacatcatagacagtgacggcggagtggccgctggacgagtgataacggcacaccccttcgtcatgaagcagaatgattacattattctggaagttgaaccacccttcggtgacagcaaaattgagattggaacaggaacaacaaaactcgttgaagcatggcatcgaaaaggtagctcgataggaaatgcctttacggccacttacaagggcatcacaaaattgacagtgcttggagaacatgcctgggattttaattcactaggtgggtttggagcaagccttgggaaggcggtccatacactgtttggaggtgtattccgggtgatgttcggaggcatgggatggttaaccaagatctttgtgggtgctgtcctagtctggctaggattaggagctcatgacaagacgatcgccaccaccatgatcctggtaggatccatactgatgtacatggcagtgaccgtgggtgccctatcggaaataggatgcagtctggacattagccgaaaagaaatgaagtgtggggacggagtcttcatcttcagagaggcaggcatgtggaaggatgggtatgcgttccacccttccgaacccaaatctctggccgcgtcagttctcaagagttggcagtctggagtgtgcggcgtgcgctccacgaacagaatggaacatgccatgtggaaacagattgaaaatgaattgaacggcattctagaagagaatgaggcgcaactcagcgtggttgtgcgagagtctaacgggaccttcccgagaggagagcgccgcatgcacgtggccgaacctctgcgctatggatggaagacctggggaaagaccgcaatttcgacggtgccgctcgctaaagaaacgtttgtggtagatggcaatgatgaaggagaatgtccctctcaaatgcgtgcttggaattccttccaagttgaagagttcggaactgggctggtgaaaaccaaagtgttcttggacatatccactgctctcaccgcccaatgtgacaccaaaatgctgggcgctgccataaaggggaataggtctgttcatggagatccaggtctctggatggtctcagctgaaatcgatgggacatggcagataatagagctcacattggcagagagcaggcgttgcacatggccagactctcacaccgtgtggggtaggaatgtccaggagagtgagttgatactgccaccgtctttcggaggaccgatgaccaacatgaacaagcgtaaaggctacgcgacccaagtgggaggaccatggaaccatgttccactacgagtagtttttgaagagtgtccgggaaccactgtatctgttgaaccaaactgcaccaggagatcggattcagtgcgatccacaactgatagcggcaagattataaccgactggtgttgtcgttcctgtacaatgcctcccctaacgtaccgaacccccgatggatgctggtatgcaatggaaatcaggcccaagaatgttaaagaggagagtctgatccgttcgcatgtggcggcaggtgtgtttaaaggcattgacgacgtgtcactggggctgttagtaatgataattttcctgcaggaaggtttgagaagaaagttaactgcaacgtatatcatgtgggctgctcttgtggtcctcattgcaggaatcctaggggaactcacagtgagggatgtgctcaggtatctcatcctagtcggcactgcattcgctgagagtaataatggaggagatttaatacatctggccctagtggcggtcttcaagattaggccggcattcttatttggattcttgttcaggagtcagtggtcccccagagaaggtgtgttgctggcatctggagcgctgatgctgcagattgcaagtgagtgcttgcacgcatcggcgattatgcaggttgtcgattccttgagcatggggtggttgatgatcagagccattgctgtacctggtatgacctcaaaagccatgccactgctgtgtgcctgcattcctgcagttacgagcctactggcccactcaaccagagccggtataatcaccatggccggcatgtcgcttattgcaggaagtaagggatcatcagttaaaaaacacagtccatacatgcttgccctcgtggtggcaggcctcggagcccgtcccataggaatgttggcgatggaagccttctctcacctgaagggccggagatcatggccggctggtgagatgatgtcagccgttgggctgacatgtgcgctagtgggagctatcagtggcgcatcatctcaggacttcgccggacctctagcagcagcggctctaattattattgcatatgccattagtggacgctcagctgatgtataccttgagaaagccggtgagatatcctggagtgaggacgctaaaatatccggatcaagcccgcgcattgatgtgtgcgttaccgaaaatggagatttcaaattgcgtcatgagagtgaagcaacctggacccggaattgtgtcttggctgcttgcttagtcgtagccggagtgcacccactggggattccagtagcagggttgatgtggtttggatatgtgaaatcaaacaagcgggggactgtgttgtgggacattccctcaccacaggcaacatcagctccaacggtggaagatggatgctaccgcgttatgtcacgtagactgcttggcagcactcagcttggtgttgggatcatgctagactctacatttcacacaatgtggcacataacccgaggagcatctattgttagtggtgaagggcgtcttgacccatattgggctgacgttaaggaagacctggtctgttacggagggccatggaaaatccgcaacacatgggatggactctcagaagttcagctgatagcggtggccccaaaagagaatcccgtgaacgtccaaacaatgccaggaaagttcattgtggcgaatggaggtgagataggagccgttgtgctcgactatcctcctggaacttctggttcacccatcgtggatcagcagggtaatgtcataggactgtatggcaacggggttatgatcaatgaccaaacgtatgcgagtgccattgcgcaagctccagctgaagttgcgcgcaccccaacctggttcactgatgatatgttgcgaaagggacaattgcatgtgctagacttgcaccctggagcgggaaaaacccgcaaggtcctgcctgagattctcaaagcagcggtggagaaacggctacgcacgttggtcctggccccaaccagagttgtggcaaaggaaatgcatgaagcattgaccgggctgccggtacgctaccagacatcagcagtggcaccaaatggttctggaggagaattgattgatgtcatgtgccatgcaacatacacacaccgccagctgacaccgggacggggggtcaactaccagttatacatagtggatgaggcacattttacagatcccgcttccatcgcagctcgcggcatcattgcgactagggtgcgattgggacatgccgcagcaatcttcatgacggccacacccccgggaatgtcaaacccattcccggagtctaatgctcacattgaagacgaagagcgggaggtacccaccaaagcttggaacgctggatatgagtggataacagactatgggggaaaaaccgtgtggttcgtgccttccatccggatggcgaacaccatagctgcatgcttggtacgagcaggcaagacagtcattgtactgcacagtggctctttcaatgaagaatatcaaaaaaccaagtctggcaattgggatttcgttgtgacgaccgacatctcagaaatgggggccaatttcaaagcctctagggtcatagactctagactgtccataaaaccgatgttttcctacgctcccagtgagcgagtggttattggctcacctagagcggtttctccagccagcgcagcacagcgccgagggagagtcgggagagaccctcgtcaactgggcgaccagtatatctatggtggaccagtaggagaagactcggccgagttcgttcattggaaggaagcaaggatcctcatggataatgtaactgtccctgggggcttgtatccacaattctacgaaccagagggtggaatgtgtgacgccatggatggagctcaccgactgaccgatgctaagagagaagtgttccgagacctcatgaagaaaggggaacttcctgtatggttagcataccaggtggcccaggctgggcatgcgtacactgacagaacttggtgctatggggggccggcggatcatcaagtgtatgatgattgcggccaaaccgtggattacaggtcccttaatggagagaggcgtatgctacgtcccaagtggcttgatcagcgcacctacaacgacaaaacatccttaaggctcttcacggaatttgcagagggacgccgccgatattcggaactaatggacgtgtttggaagaatgccccaacacatgttggacaggaccatcttggctgcagacacgtttaaagatgtcctgacagcaacaccgggatctcgtgtgcaccgtttagcactggacaatttacccgaagctacagaaactatgatggtagtgggaatcctgagtgtctcgaccctaggcgttatgctatttctgatgtcacccaagggcatgacccggatgacctgcggacttgtggtgatcatcctggcgacgtattttctatgggtgtcaggaatggccggctaccagatagcagcaatgcaactcatcgcgttcattctgtttgtggtcttggtgccagagccagggtcacagagatcagtgcaagacaacaccatagcgataattctcatagtcatcctgtcgttggctgccatcatagccgccaatgaagcaggattgctagagaagaccaaaaaggatttcgcgtggaagagggagagtcatgtgctggtgactccgagtccgtggaacctggatttctcaatggatttgaggccagccaccagctggtcattgtatgtggtgatggccaccatgttagggccagtactggaacacgccattgtcaccaattatgctagcgtctcacttactgccatcacaaaccaggcaggaatactgctgtcaatggataagggcactcctttctggaatcttgactggagtgttgtcctgttgtgcgtgggcagctggtcggggatcaatggcactacactaatggttgcttccacaatgacagttttgcattttgccatgatactacctggcattcgtgccaaagcggcgagagaagcacagaatcgaacagcagctggggtgtcaaagaaccctcttattgatgggttaaacaccataaacatccagccgttgccggaaatggaccccatgtacgaaaggaaaatggggctatggatgctaatcgctgttgccggagccgcggtggtttttgacaagagaatgctccattacaccgagttcggagtattgggttcagctgctgtgagtcctctcattgaaggatacgcgtctgctgtttggaacacttccgtagcagccagtgtgtgcaacctaatgcgaggccattacatggcgggaatcccaatggcatactctctgatcagaaatctatccatgaaaggagttcctaggaggggattacaggccacccatacccttggtatggtttggaaacacaaattaaacgccatggacaaggcggcctttaacgcataccggaaggatggagtgacagaagtggatagggagccagcacgtgaagctatgaagaaaggagatttggtgagcggatgggcggtctctcgagggtcagccaagctgcgatggatgcacgagcgtggatacattcccctacaaggagttgtcattgacctcggatgtggaagaggggggtggagttactacgctgctgcacaacgccgggtgaccgctgtcaaagggctcacgaaaggcggaccagggcatgaggagccaatcaacgtccagtcatatggatggaacttagtgacgttccgtagtggagtggatgtctttcacaccgaagtccagccggctgacaccctgttgtgcgacataggagagtcttctgctgaccccgctgtcgaaaaagcgcgcacagtacaagtgttggtgaactttgaaagatggattagagagtcgcggtgtgagcatttttgttgcaaggtgcttggtccctactctcccgaagtgatggagcgcttagatcgtttaacaaagacatatggaggagcggtaattcgcaacccactatccaggaactccacgcatgagatgtactgggtgtcaggagctaagggtaatccagtcaatgctataacagccacctcacgtgtgctaatcgaacgcatgtacagaagacttggcaagagttactgggaagaagatgtgaatcttggtactgggacccgtgcagtttcatgtgccgcggagaagccagatctagcaaaaatcggaaggcgcattgagttgctgaagaaggagtataaagcatcatggttcgaggatccagagcatccctacaagacatggacataccatggttcctacgaaaccaagaccacaggcagctcgtctagtatgattaatggcgttgtcaaggagatcactcacccttgggataccaacccaagggttacaaccgtctgtatgaccgacaccactccttttggacagcagagagtattcaaggaaaaggtagataccaaggcacgtgagccatctcaagggacgcgggagatcatgagaatagtgagcaagtggctcacactatatattggtcggagcaagcgccctaggctgtgcacagcggatgaattcatagccaaagttaatgctgatgccgctctcggcacgatgttcgactcgcagggaaactgggcgaacgccaaagaagctgtgcgcgacccacggttttggcagttggtggccaaagagagggaacttcacctgcgtggacagtgtgccacgtgtgtttacaacatgatggggaagcgagagaaaaagctgacagagtttgggaagtcgaaggggagccgagcaatttggtttatgtggctaggagctaggttcttggagtttgaaagtttaggcttcctaaacgaggatcattggttgtcacgtgaaaactcaggaggtggagttgagggcattggattgcaataccttgggtatgtgttgaaagaaatggcactaattcccgggggcaagatgtacgccgatgacaccgctgggtgggacaccagaattactaacgctgaccttgaggatgagatggacatattgggacttatggacccgcatcacaaaaaactggcaaaaaatctgatggagttggcgtacaacaacaaggtggtcagagtgatgcgccctggtaaagggggaaaaacactaatggacatcattagccgcaaggaccagcggggaagtggacaagtggtcacctacccactcaacacgtggacgaatctcaaggtccaattgatccgtatggcagagtcagagggagtgttggaccccaaggagatcgatggaatcactgtcacgactcggaataacctggaaaaatggctcactagccaaggggctgagcgtctaaagcgcattgcagctagcggtgacgacgttgtggtaaaaccagtggatgagagattcgccaatgctctcacctatctaaacgacatggccaaaattaggaaggacatcagtgagtggaaaccatccgcggggtggttccactgggaagaagtgccattctgctcacaccattttcaccagttggtcctcaaggatgggcgcaccttagtggtcccatgccgtgaccaggatgaactaattggaagggcaagagtgtcacctggtgctggatggactatcagagaaactgcaggtctaagcaaggcctatgcccagatgtggcttctaatgcacttccaccggagggacctcagaatggcaggtttcgccatttgtagtgctgtccccagtgattgggtgcccacgggaaggacatcgtggtcactgcacgctaaaggggagtggatgaccactgaagacatgttagcagtttggaacagagtgtggattgaagacaatccccacatgtctaacaagactttagtgggatcatggcaagacatcccgtaccagaggaaatccctggacatccactgtggctcaatgatagggcagcggtctaggtcaacatgggctgctaacatacgaattagcattggacacgtgcgccgattgattggaaccacggaaaagtacttggattacatgcaggagcaggagcggttcaagattgctgaaccaacccgtctgggcaatgtgatctaaggatctacgaacgagaataagtagaagaacggaacgacagagtcaggcctcaaatgagccagcattaatgagagtaagtgctgctgcctgtgcctctccttaacacgtggtagcgccactcgtgtttcgttacctaatagcgctagagtcagacccaagtaggccagggctatggttgtaagccctgctgtctgtggcagccatccagtggtaatgcgtcgcaccactaaggattaatagacgtatattgggagggactggtgaggagcagcaagctcgagctgcatcacccactggtactatcggttagaggaaaccccctccaaaatgtagagcatcatatcgacacctgggaaagaccggagatacctcttgcttcacagcactcaatccacaaggcacagatcgccgaataattgtggattggggattgagaaacatcaagtatct

SEQ ID NO: 41 - DNA, 10839 bp, Bamaga virus
cgtaaaatccgtacgcttgttttggcacactagtttgtgacataaggcttttgtcgcgcgtattgggtttaactttttttcgagaaatcgagaggtaagaagaattgaaagacattatgtctaacccttccgtcaggaggggtgtcaatgtgatggcggctcagaaaaaacgagtcgcccaaaaaataaaatcaatgaggaagggaacccagagcatcagcaatggagttaggggtttcatcctctttttcatatcccaaatcttctgggcacgtaagatcacgcccagagtgaaaggattgtggaaaaaactagacaaatttcaggcaatgaaggttttgaaagggctaaggaacatcatcaatggattgatgagatcggtcgctgggaaaaagaaacgccgtggagggaataccgtgccattcttagtgatgatgatggtagcaacaacatgggccttaactctcaggaagattgacaacactattgttctgaatgtcacccaaaatgacatagggaaaacatttcctgtaaggggcggtaattgttccattaacatcaatgatgctggatactggtgtcacaatacagtcgaatatgattgtgtcaccatagctggtacggaagagcctgacgacattgattgctggtgtgttggcattgaaggagtgagagtgacttacgggaaatgttcaaagtcatcaccgcacgggaggagatctcgtagagcagcagtcattcccgcgcatggtgggcagggactatcaacccataaagagacatggctatccactgtagcaggggaaaggcaaatccaacgtatagaaagatggatcattcgcaatcctctttatgccgctgcaatggtgactgtggcgtattttctgggaagtgacaccaaacagaaagtgctgttagctgtgttaatgttggcaattggacctgcttacggctctcactgcattggaattgaacggcgtgactttgttcatggagttcagggaagcacatgggtaaatctagtgctggaccagggatcttgcgtgaccatggtgactgaaaacaagccaagtgtggatgtgtggctcaaggaaatctctttgagtcaacccaccttggttaggagatatagccacacagcaaaggtccataaaacagaaatcaaagctgcttgtcccacaatgggagaggccaaacttgatactgaacacaatccgtcgtatgaatgcaagcgcacttattcggatagaggttggggaaacggttgtggtctgttcggaaagggtagcatcattgcatgcgccgagttttcctcaacgggccatatggatgtttatgaaattgacatgaccaagattgagtacatcgtgaactcgcagattcatggaactgtgctcgttgagaacaattcccagcatgcagtagagtcaaagttccagccaacaacaggaggagctgaagtcacacatgcagggtatggcacacttggcttggactgtcatgtacaaaccatgatggatctgaacaacttctatctggctgtcatgggatccgatgcatggctagtgcacaagcaatgggtggaagatttgacattaccctggatggcaggtgaaactggacactggaaagaaaagaaatatctagttgaatttggtgaaccacatgccacgaagatggaagcccttgttttaggttcccaggagggggctttgaggactgcccttgctggagctatggtcgtggtgtactcccaaaatgacaaaaaattcactctgaaggggggtcatgtgagttgtagagcaagattgactgacctgacattgaaaggaacatcatatccaatgtgcaagggctccctcaagttcacaaagactccagttgacaccggacatggaacagcagtgatgcatgtgcaagtgacgaaaggggcaccatgcagaataggagtccaaatggctgacaactcaaatggaggaaagtcgttgggaagcatgattacatcaaacccaatagtctccactgatggtgaggagactctggttgaagtttctcccccatatggagaaagttacatcatagtgggatcaggcgatggcaagttggtttaccattggcacaagactggaagcactattgggagcctgttctcagaaaccatgaaaggagctaagagattggcaatcctaggtgatgacgcatgggacttctcctcaacgggaggggtcttagcctcagttgggaaaatgctgcatactgtgtttggacaagctttccatgcaatctttggagggttgagttggatttcaaaaataattctaggttgtgttatgttgtggataggtgtgaactcccgcaatggcacattgagtgtcaccttgttgactgttggcggcattctgttgttcatgacacttggagttaacgctgagtacggttgctcattggacttccaaaggaaagaactgaagtgcggcgatggagttttcgtgttcaatgatgccaatgattggttgaccaagtacagatatcatcctgaagacccacgaacattggcttctctggtcaaggcttcatataaggccggacggtgtgggcttggatcagttgacaacatggaacataagatgtgggtgtccctggaaaatgagttgaatgccatctttgaggaaaaccaagaaaatatctcagtggtagtgaaggagagtaatggaatataccccaaaggaaattatccattcactggcactccagaaaagctgaaatatggatggaaaacatgggggaagaaattggtatttgccccggttttgagtaacaacacctttgtaatagatggaactcccgatgattgtccttacagcaacagagtttggaattcatttgagattgatgagttcggagcaggtttgactcataccagggtgtttttgaaacaaagactggaaagaaaagaagagtgtgacaatgcacttttaggagctgcagccaaaggggacgtggcagtccatggggatcccaacttctggatggcctcaaacaaaactggagaagtgtggcagatcaatgaattaatgtcactaaacctcaagcactgcacatggcccttgtctcatacgttgcatggcaatggagttctggaatcagacatgttcgttccgaaaagcattggaggaccggttagtcaccacaacttcattaaaggctacaaatctcaggtaaatggaccttgggcatcagtgcctctagaaatgcatcggagagagtgccctgacacagtggttcaaatagatcagaactgcagcgggagaggcaagtccacacggagcactacaaaggaagggaaaataatccgggattggtgttgtcgaaactgcacgctgccccctgttagctttgatggtcctgatggatgctggtatgctatggagattagaccgcagaagatgaatgaaaaacatttggtcacttcatgggtaagtgccggtgacgggatggaaaatggtaacattggattggtggctctctttgtgtgctttgacatgttcttgaagaacaagaacacccgaaagattagcttggttggagccttgtgtctattgggcgcaatgatccttgggaatgttggatttgttgatctaataaaattcatgattgtggttggtgaacatttccgctccttcaaccatggaggtgacgtctcctacttggtcctgaccgctgtctttgacatcaggccagccctgctctgcggctttgtgctgcgcaagaaatggagtcctagtgagagagtagtcatggccattggaatgatgctcctgcaaacggtgtgtggggattggactcagacatcttggtgggaatggctggatgctgttggattggggctcttgatcctcaatgcagtagctttacaaagatggaaaccggccattttggtcttgctgacaatgttgactccgctgaatatgcgagtaattcaaggtgctgcagggggagtgtgtggcgttatggtggccatgtctttgtggaaaacagaaggaagaagtctccgtaagagttacctgccagtcattggctatgttgcttcggcttttggatgggggtattcatggatcatggcagtgtacatcatgtgggcaacccatgtgtcaaggagatcttggcctgtaggagagctggcagcagcaattggacttttgggagctgcaatgggaatggcatccacaaaggatggagccatggtcatgccaatagctgtgctcggattaatcatggtgatcataggaatgacaggcaaatgcgatggaatggagattcgcaaagttgggtgtgtctcgtgggaagactccgctgagatcagtggttcaagctccaggtatgacgtggctcttagtgatggcggagaattccagctgttagagaattcgcggcccccctggaatcacatcattttcctcaccctgggaatgctggcgtcagcagtgcatccaatagtactgggtgtggtcatacttgcctgggggtggtttgcaggcaaaagccagcgcagtggagttttgtgggacgtgcctgttgctccaaaagttgaggaccatggaccccttgaggatggaatttacaccattttccagaatggattgtttgggagctcccaggctggagtaggagtggctcagggaggcgtgtttcacactatgtggcacgttactcgtggaggaatcctgctgcacaaaggtaaaagactcacccctggttgggctagtgtgaaaagtgacctcatttcgtatggaggtaaatggagacttgatggaagttgggatggagtcgaggaagttcagttgattgctgtccctcccaggaaaaatcctatcaatgttcaaactaagcccagcattttcaaattaaagagtggagaggagatgggagccatagctttggattaccctagtggaacttcaggatcacccattgtcaacagagctggagtcgttgtggggttgtatggaaatggaattgtgctcaatcagggtggttatgtgtcagctattagccaagcagctgtggaagaggtcagtagagatgagctacccggaattgaaggctacctgagaaaggggcaactcaccgttctggattttcacccaggggcaggaaagacacgtaacttcctgccccaaatcttgaaggcatgcaggacccgcaagttgcgaacactagtgctggccccaaccagagtggttctgagcgaaatgaaggaagctctgaatgatcacgatgtcaagtaccacacacaagctttctcatctgccagttcaggacgtgaactgattgacgctatgtgccatgcaacattggcatatagactattggaaagcactagggtgataaactgggaggttgtgataatggatgaggctcactacatggatccagccagcattgctgtgaggggttgggctgcccatagagctagagctcatgaatgtgcaacaatattcatgtcagcgactcccccagggactgcaaatgaatttcctgaatcaaatggaggcattgaggacatccgcaaggacatccccagtgaggcttggaacaaaggtcatgagtggatcctagaggatagaaggccaacggtgtggttcctgccctctataaggagcgcaaataacattgctgcatgtttgaggaaagccaacagaacggttgttgtgttaaacagacagacctttgaaagtgtgtaccccactatcaagacaaagaaaccggacttcatcctagccacagacattgctgagatgggggcaaatcttcatgtggaaagggtaattgactgccgaactgctttcaagccagtgctcagtgaggatcaggaacgggtaacactgaaagggccaatgagaatatcagcttctgcggcagctcagcgaagaggccgtgtggggagagatccatccagagagtctgacacatattactatggagaggacacctcagaggacaatgaccatttggtgtgctggactgaggcgtctatgattctggataacatggaaattaaagggggaatggtggctccgctgtacagcgtggaagccacaaagaccaaaatgacgccaggtgagtgtaggctaagagatgatcaaaggaaaacttttagagcattaataaagaaacatgagctgcctgtgtgggtctcatggaaggtggccaaagcaggaatcactccagatgataggaagtggtgttttgatggagaggaggacaacaccgtgcttaatgacatgggggagaaggtcatgggaagaagcccaggaggtgcaaagaaagctttgtgccctaggtggtcagacgcaaggctgactagtgacaatgcttccctcatgaacttcctggcatttgccgaggggaggagatcatacatgaggatcgttgacgctctcatcatggtgccccctatgctgaaagaaaaggtggtggatgcagcggacaccttagcactactactgcgttccgaggagggcagcagggcctacaaacttgctcaggagagcgctccagaagcgatcacaacactcatcatggtaaccttcctggttctgctatcagcaggactggttctgatgctcatgtggccaaaagggattagcaagatgtcattgggcatgctcaccatgagcgttgcgggataccttcttttggaaggagggctcacccaagtgcaggttgcaggaatattgctggtgtttttcatcttgatggtggttctaatccctgatgatggctcccagaggtcaatcaacgacaacaagctggcttacatgatgacaggaattatccttcttgttggagctgttgctgctaatgagatgggatggcttgaaaaaacgaaacaggatttgtttgggaaaagggaagaaatgccgggatggaactgggatttgggacttgacctaagacctggagcagcctggaccacttatgtggctctggcgactgtccttggcccagtgatagaccattggatacaagtggaatatggaagcgctagtttgactggcatagccaattcagcaggcatttccgcatttctggacaagggggttcctttcatgaaggtcaacatggcagtggtggttctgtttgtgagcgcatggaatagctattccatgctggccatcatggagggttgcctgatggcaggcattcatttttgcctgttaatccctgggctgaaggcaagagcaatgaagaaggcccaaaagaggatctatcatggtctatctaagaatccagtagttgatggcacacccactgtggatattgaagaagctgaagaaactccagtactgtatgagaagaaagtggctttggcactgctgggagttgtggctgcgctcaatggaattgtggtcagaacacctttctccatggctgaatcaattgtgctggggagtgccttggtgggtccttttattgagggtaacacgtctccactttggaacgcccctatcgcggttgcgttcgctggtctaatgcggggacattatagcagcatgataggattggcctacaatttttggatattgcaaaaccccaaaagaggaggtggtgagaccatgacccttggccaggtgtggaaaaagagactgaacatgcttgacaagaaggagtttgcaaaatacaagatttcagacattcatgaggtggaccgtaggcaagcacgtaccattctggacgcaggcatcaccaacgttggagtcagcgtgtcaagaggaacatccaagctgaagtggctgacagacagagggtactttaagccagaaggtagggttgtggatctcgggtgtggccgtggaggttggtcatacttggctgctgcagcaagagaaaccctggaagtgaaagcttacactctaggtgtgtcagggcatgagcgaccaattcaaatccaaagcctgggatggaatgttatcaagtttaaggacagagttgatgtgcacagacttccaatcgcccaatgtgacacagtgatgtgcgacattggagagtcttccagctcttgggaacaggagcgagagagaaccctgagggtaattgacctgatggagaactgggtggccaagagcagacccaaatactgcttcaaggttttggctccctactcctcagaagtgattgagcgtctggaactgtttcaaagaagatttggtggcgggataatcagggttccactctcacgcaactcaacccatgagatgtactacactagtgaggtcaccaataacattgtgcacatggtgaactgcgtctcaagattgctgctccggagaatgaccaaccccagtggaatagccatcttagagccagatgtggtttttccaacaggaacacgcaatgtcaagggggacttgggccccttggacatggagaagatcaagatgcgtgtatccaagttaaaaaaggagaacttggacacatggtggcatgatgaaaatcatccatacaggacctggcattaccttggaagctacgttgctaaacagagtggcagcgcagccactatggtcaatggaatagtcaagctactgagcatgccatgggataggattgaggatgttactgccttggccatgacagacacaacaccatatggacagcaacgtgtgtttaaggaaaaggttgacactagggctccaccccctcctccagggactaggaaaatcatgagcattaccaacacatggctctttgatttccttggccgaagcaaacaacctagactgtgcaccaaagcagagtttatagcaaaagtcagatcacacgctgccataggcaacatgttggaggagcaggaaggctggaaaaatgcagctgaggcagtgaatgatccaagattttgggaattggttagtgaagagagggagctacacttacaaggaaaatgctccacatgcatctacaacatgatgggaaaaagagagaagaaacccgctgaattcggacgtgccaagggaagcagagccatatggtacatgtggctcggagctaggttccttgaatttgaggccctgggtttcctcaatgaagatcattggttctccagagacaactccaagggtggtgttgaggggatgggcttgcagtacctaggctatgttgtggaagatgtgtggaagaaggggaatggaatcatgtatgcggatgacacagctggatgggacactaggataacagaggctgatttggaggatgaacaatacctgcttgaaaagatgagtggcactcacaagaaactggcttgggctattacagagttgacctacaagaacaaggtcgtcaaggtccctagacctggacctggaggaaagattctgatggatgtgattgccaggagggaccaaagaggttctgggcaggttgtcacctatcccctcaacactggaacaaatctcaagacacagttaataaggatggctgaaggcgagggcataatcaccccagaggacacactccaactcagtcacaagaatgagaaaaatttgagggaatggttgtgcacccatggtgctgaaagacttggtagaatggctgttagtggtgatgattgcattgttgcgccaattgatgagaggtttggcaacgccctaagtcatctcaatgccatgtcaaagattagaaaggacattgatgattgggagcccagcaagccttggatgaaatgggaggaggtgccattctgctcccaccatttccaccatttgctactgaaggatggcagaagaattattgttccatgccgaaaccaagatgagctgattggaagggcccgagtgtcaccaggaaatggatggatgatcaaagaaactgcatgccacagcaagtcctatggtcagatgtggctcctcatgtatttccataggagggatctgagattgatggctaacgcaatatcatcatgcgttcctatcaattgggtgccaactggaagaactacatggtcacttcacgctggaggagagtggatgacctccgaggacatgctggaagtgtggaacagagtttggattttggacaatcctcatatgagtgacaagtcagtaatcctagagtggagagatgttccatatctggcaaagagtgatgatatcaggtgtggatcattgatagggacatcacagagagcctgctgggcagctaacatccgttctgtggttgagaaaatcaggcatttggtgggagatgagaagtacaaagactacctgcactccatggacagatatgccctggaacactccgaaattggctgcttgatataaattaaagcactccattaaaccaaccaaacactccttcatcaaacaacactccatatttaaagtgtcaggccgggaaaccgccatggctaagctctgaggccatgcagtctgggagagcagcacattcttgcccacagttgtgcttaattacatttttgggagcctccctttgtcatgcgatgcatggtggcaaagcgacgaggactagtggttagaggagaccctccctgggctatgcatcaagtcggaccgtttctacgggaagctgtaaaccgtactgtccgtgacagcattccgaaaggttgggcgaagctgtaagcctgtaaaactttggagcctccgctctgcgacccgtgtaagcagagtcgatggggactagtggttagaggagaccctccacagcaaacaacacacacggatcacattgacaccagggatagaccggagattcttcttgcctctcgacagctttaggcaccgattgccaaactacgaagctgtcgagaaacgacaagaatct

SEQ ID NO: 42 - DNA, 11209 bp, Karumba virus
  misc_feature (324)..(324): n is a, c, g, or t
acaagccamggccgccatgagtccgatgataaagcatgctacaacatgcttgttgttcctagttctttgtcgagtctccttgcgtaccttacgtcccagtgatcgcaagttgcgtaccaactcattccaaatggtgaccattgcgacaaccagttttaacaaagtctcgttcaaatctccagaaaccatattgagtgcycggcgaagagawgatgtttttaaaaaacctgcctgtgttttcttggttattttacctgttttcactcacttggttggtttgtttgaaatccatttcttttaactatcgaytttacgttrcgtttngactatgcargtcaagaaaataaagatgcgtggtggaggaggtggaaagctcggcattaaagggataaaaacatcwtccctgcgtcgggcactcaatatggtctctggagatttgaatgagaccttgctgaaactggtcatcgctatgatcgccatttggaatgagttactacgtaacttgcgrtcattggggcgtagggttcgcaaggagactcgacaaagaactggaaacaacaagcatgttgtagcatgctttatcatyggactaatggcggccttggcttgcgccaagaccatgaatggaataatggacaagggtgagcacgtttggaaagctgactggaatgttgactttaccaatgtgaagctccccaaggacttctgcggatctggaatacacgtggagaagatgtgtcctcaggttgattctttgcaagatgcaacaatcgactgcgcaggaagacatgaccaatttctcctgtcctatacacgatgtgcggctaagaatcgtgtcaaacgtggtgaacccggagtagtggaaccgaaagtcacgaacatatggaccataacgttcaatgatgagttgaacagcatcattgaacgtgtgagcgggatgctgaagaacaatcgattgatggcaacagcagtcatttgcttagttggggctttcaagaaatggcctacatggctcgtcgtgcttttggttttactgccttggactgtcgtgcaggcatcactggccgatcctttcttaattctgccgaagggtgatggtttggtaaaaactagattatacccaggacagatttcatcaatttccacacacgttggggtactggacatctcttatatggctgtggacattgaggaggggcgactcgttgaaaggttgatgtcacattgcgaagtaaatggaacttactcacaggattgttgcgctttgggatgcaacttggacttatctaagttaaatgagcggaacagggcctgtcaaacggctacctacaatcgcgggtgggctacgggatgtccagtttttggactgggcagtgtggccacatgcgttgaggtcgcgtgcagcgatagtgtggaggtgtccgaactgacaagccagaacatccggattcctctatctctacgtttgcagcatgaagagctgaatgtgaccatgacaacagaggcgccagttacttcaaagttctcacatcacggggtggtatccatctcttgtcaaattggcaatcctgggttcttggcacagcagtacgtgctgagcaatgggaagcataaagcaatgtttcccatcagtgcggtatcaggttggcctggaatccgtgagattggtggacagtacaggaacgtggatggctccgtcaagtgggggcacgttgaagcgaatgagattaaggtggccgctgtatatagtgacagcatccaatggaagactggaatcccgataaagacaggtattagagacccactgtatttgtactgtgaagtgtcgctaactgacttgactttcaagaaaataagagcatgtgaatcgcctgttgaagtttcgttcatggcaggacctacgggtttggatggtcgrctagaaattgggttgcttgagcaagtcaacaaaacatgctcaataacagggagctgtgaaggttgtaccttaccgcacccaaccagtgtcatttcgacttctgacaagaaaggccacatgcacgtagaatgtcgcacggggacatttacggcaatattcggaaagcaaaaattttctttcacctgtcrracwagttacctcagaactatttgggctacgactgcccaggcgattggaaattataggaaattcggactggatgcctcaggaggaccatttttggacttatggaataagataggtccaaatttctcccgtttggaggttgttggaatccttgttgtggcagccttgttaattgacaaaagactcttacttctcctggctatttttggatacgtcacatacgtgcgagctgatgtgggttgtggtattgacctatccagaaaaactttttcatgtggtgagggcatattcttgtggaacgacctttcatcgcagacttgggcttatggagttgaggtcgtagaaaccaaactgctggaagcctacattagtcagatgctgaaagagaggacgaaagtctgcctactgtgtgaggacatcttgcaatgttcagcagcccgacgcttagcagcggttgtggctaaaagcaatccagatgtctattacaatgattcattgtcatacggagctgtttttcccatgcgaaagaaaagccaaataacgataacagctgacggccggtcggctgtggttgcctccttcgtaatagaaggaatgataaccaactcagctcttggcaaattacaatggaacgtgtggaatcctcggccaacagcggaggctatggacgacaaagtgatccgagttttaacaacagggtctaacataacgtctgtatgcagtaaagccattggttttgagtacgttttcgaacggtttactaggaagatgtatggctcaagcgtcctagtgaaaagcacttcacacatttcccacacttgccctacttatttggctggtgctgccatcaaaaacaacagaacaattcatacggatgggttcttgtggatggatagtgcactgcaggcaaatggtacataccgactcagttcactatcagtgctccagagtcatgagtgtgagtggccggtgacccataccatcaacccaacggacccaaaggatcgctctttgttcatgccagcgaggtttggagctcctgcttcacgagctaatcatatgccaggatatcttacacagcgtaccattccatgggataaggcacccataaagctgatttatggagtagcacctggaactacaattaaagaatttccaacgtgtgacgatcgcggcgatgctctgcccatcctttcacaagaaactcgtgagtggtgttgcaaaacttgtttaagcaaagggactccgccgtttcacctagtcgtagatgggtctttgtactacccagaagaggtcagaccgatacccataccaacgaagatcacggaatctgtagctcaacccgtaacgcctccacctgtcatgaaaacgatgggggcagaagcgactcaggattttcagatggggccaggggaagggacatttgctcgcctggccctcctggcattggccttacatctaatatcacaaaatacgcgtcatggatggatcacccgggtcgcgtgtgcagccatgcttttctccgtgactggcctyccctatcacctccggtattggtggccggttattggtttctcggttttaaagaatgcgtcgggacagtctttgctagtgtcgctgtggttggcgttacacactactggtgggcacctcgtttgtttaggttcactcctgcggcaaacaagatggtgctaccggctccaatccctaatgatgctggtggcgtccctatctctgtaccggttccgggggataacttggctcatgaacatcatagacctagtggctccgttgatatcaatatcttttctctacaaagcaagaaccctacttctaggggaagttgtcttaattgggagcgggttagctctttcatggggaaacgccctcctaactctaggagtattatttgggacccacatggtgattgcctcgctgagaaaaacagcaaacgcattcgagccaggactacgtgccaacatctcattgtgcaacttcccacaacaggttgtgagggacatgtggactgtattaaagaactggcgcagagcacccgcaccttggcggagctctgggagaacacatatctcacagctagcggtttatctcctgctgttgggcctcgcttatgcgttccaccttttgaacttggaagttctagccggagcctgcgtcttaatcggattcctctggattttgatgggagaaatgctgacctcgggagaactagaactgcggagggtgtcggctctggagattcctcagggccttgaaaaaatygtcatagatcgagacttccaaagcgaatatgggcggttcacagacgcgggtgtcaaattggacaacttcaatgacgaaacgaatgtcaagttcagcttactttccctaggatttgtggcggctctcatcactgtaaacccagtgtgtggattgacaatcggattcctaatatggatcttcacatcatgccctctcgcaaaagacttggccatggcagcaagctgcttccgctcggatgatggttttgctgtattaataccaggggtgaaggaggtggctattgggacaagattcttcacgttatccgatggcgtttactccgtttgcagacgatcatggaatggactcagtcacgtaggagctggtgtggcgaaaaacaatgtcttccacactctttaccatgtgacaagaggtgaggcgatttcatgggctagtgaaaaagtaggacctacgagtgggtgtgctttgagagacgttgtaacatatggtggagattggcagttcccgctggtcacggaagatgaagcggtcgtgaagattgtcaattccgacctaactgtctctcattgctacaccaatgtcctcagtctcaatgttcaaggtgaagagtacggagtgatagggcacgatttcatggaaggttcttcaggttcaccggttttttcttcgcagggggaaataatgggattgtatggctatggattctatgaccgtgagaaccggtacaactctctgatttcatacatgaagatggaaaaagaagaggagaaagtgaagacgacggaagagcaaccaacaatgagggggactaggacgttcatcaactggcatccagggaaagggaagacccgtaaggtgattctcgaagaagctgtcagacatgtgaacgaaaacaaacgcctactcattttgacacccaccagagtagtgatgacggaagttctacaagctttgactggaaatttgcccttcggagttcgtgttgggaagcacttgagtaaaagcagatcatttcagattactgtcgcttgtcatgccaccctracaagtcatgtgcttcaacatggattgaagatyaacttctctactgtcatcatggatgagtgccactttctggaccccctgtcaatagctgcacgcggtatcatggagcatatgcattcgaagggggctgctctcatgtatctcagtgctactccgcccgggaaagctccacaagctggttcaaattaccctattatagacgtaccatctatgcctagggatgttgataggaattttgtgacatcccaagctggggrcaaaaccatagtctttgttccaacgattgctcaagcacagaaactgtccgatcaaattccaggctcagttgttttatcacgcgaaactttcgatgtaaacatgtcaaaagcggctaacccggaaacaaaagtggttatctcaacagagatcagcgaaatgggggccaatctcggggtagatactgtcattgacactcgactgtgcgttagaccagttgttgatggacgtttcaaagttcggttggtgaaagtcccaataactcatgcatctgctgtgcaaaggcgtggtcgaactggacggaggcagccagggcggtacatctttgacgacaaggttgaaccgtctgacgagtgctcacattgggtatgttggagggaggctcagatgctcctggatcagcttgatatgacaccgatgccggaggaagcggagaattttgacccaccaggccactataaactcctttcggaccagcttaaacagttcatggagctgctcacgacggagatgcctatttggctagcgtggaattgggccaacgcgagttcctctcgacacacggtgatttttggaggatctgaagtcactgacaagacgacccctgttatcactacaccatcagggaaacaactatataatccacaatttgtcgacgaccgctttgaggcagatgatctaactaagtttcacgccacgatccaaaaatatctgaggatgcgagctcacattaactgggagggattagcccagggcttgtggcacgtcgtgacaaagagcgactcatccatgtttaaggtcgcgtttcagaacacaatggagcggttacatgacctatcgcgctgggatgacgactccctccggacaagtgatatgaccgaatcagttggcacgtggattatcgtcatgcttacagcygtgtcgacattcatcatctcactcttaatttttgcttgctgtcgrtgttgcaaatcgtccaagactactaggtcccaggaagttgtttacactrcaacagtcgcggaacgcaatgtcagtgggctttggagtagcatgacagttccagtgttggggtgggttgctggaattccaggacctattctcttcgttgtggcagtgtgtttaggtcttgtttgcgccttcatgtgcaacagcgcgacgcgaagctacgtggaccacaccctatcgtggtgggttatggttctatcatgcattgtggcaggcctagtcgccttcgaactcgacttgatgcctcgtactttcgctatcctttcaagagtggctgctaccggggctagatttgacactggaccaagcgtggaacccttcatcgttactgggagacatgtaactgttgaactctgggtrgtcatcatggcgatgtatttgacagccttgatcattgcccccatcttgaagtcatacatccaggggaagtcgatagctgctgtcttcgcgaatgaaccagttgcctccgcgtacataggaggaatgaggctgacaaccatctacgcgttgcaagcaacgatttgtgtaggtcttttctacttccacgcaaatctcccatcttgtgttgttgccagtgttgcttcgttcttgtttctaatggtatttgcttttgacgtaaagtatgccttctccccggctgtcgtccgagctttggaagccaagaataacaaacgcgacacggatcgaccatccctagaamgagacgaagaaacgaagggacgccaactgtactacacactatctgttgtcatggttgcactatgggtgaccatagtacgagaccaattaaccttcgtcacagctgccggtgtagggttgcatgccttgatgtgtttaatcgttccagatcatccattccatcggaatatcaaccaggggattgtgacaatgttgttcgggttcttagtggaacctgtraagtggacattcattgtcgggttcttcctctggggagtgatgcactacacaagcccaaactcgtaccggtcatcaaacaagggggacgccatgaacgtgggaatgaagtggaagaggctgctcaattccttgaatcagaaacagtttgacgcgtacaaatctcgctcggttgatgagactccaagaggtgactatgtgtcaagaggaggcctcaagatgcgtgagataatggaggtgcacggttgggaaccaaatggaaaagtggttgatcttggatgcggacggggaggatggagccagcatttggcgatggatcgtcgggtcacggagatcaaaggttacacccttggcggcagcaatcgggaaaaccccgaggtgttcatgacctatggctacaacttgtgcacgctaaaacccatggttgatgtatataagttggagccatttgtcacgaacactgtcatttgtgacataggcgagagtgatccgtcggccgtggtggaaaaaacacgcacgctcaaggtcctcaccctgttggagaattggttgacagtctcaaaagaagccaatttcgtttgcaaggttctttcaccgtatcacactgaagtgctgaaaaaactggaaactcttcagcatgtgtatgggggacgccttgtcagactgcgcttgagtaggaattctactgcggagatgtattacatatccgggccacgatcgaacatggtgaaggcggtgtatgctacactgagagctctaacgggccgattgtcattgtatgacacgccttttgaaagcctgccccctacattgccgacagggacacgtgccgatccgaaggccaaagccaaagctgctgatttttcattattggccaggcgcatccagaaacttcagcaggaaaatcaacacacttggttccatgataaagagaatccttacacatctttctcctatcatggttcttttgtcactgacgctgtgtctggtggtggacaaacagtcaatcccatcattagaaggttgatgtggccttgggagcaagtggccaaagttactggctttatgatgactgacgtgtccacttatgcccagcaaaaagtccttcgrgagaaggtggacacatatgttgaagaaccagaccaccgtatgaagcagatcaacagacaactagctctattcatcgcggacttgtacaagaagcaaggattgagaccacgcatcctgtcaaaacaagattttgtggctaacgtacgctcagatgcagctgttggtggatgggctagtgacatgccatgggcagacgttgaaggggccataacggatccagttttctgggatatggtggaccgtgaacgtcagctacatctcggtggtgattgtgaactatgtgtctacaacaccatgggcaagaaagagaagaaaccggctgtgttgggcaaagccaagggatcacgcacgatatggtatatgtggctcgggagtcgttttcttgagtatgaagctctgggatttctgaaccaagaccattgggtctcgagagaccacttaccatgtggcgttggtggtgtaggtgtgaattactttggcaactacttaaaggagatcgcagagaaaggcaaatggttaattgccgatgatgtggcgggatgggatacccggataacagaatcagacattgaggacgaacgttctctgttgttgtccytggttaaagatccgtatcacaaagctctgatggactccatattcaccatggcttatcggaacattgtagccctcttccccaggaatcataagaaatttggaagtggcacggtgatggacgtagtttcgagaacagatcagcgtggatcaggacaagttgtgacttatgccctaaacaccatcacgaatgcgaaagttcagctgggacgctcgcttgaagctgcagggttgctggaagccgatgataggactatacaagtttggcttcgcaatcatggagaggaaactttaagaggaatgaccgtcgctggtgatgatgtggtggttgctaccaattcggactccttccacacttcgcttcattacctgaaccgaaatagcaaaattcgcaaggacattggaccattggagccatcacgccggtgtgayaactgggaggaagttgaattctgttctcaccattttcatccaatcacgttacaagatgggcgagttctaatagtgccatgtcgtgagcagaatgaaatcatcgggcgttctaggctccaaaagggcggcattgtcagtgagagtgagggagcttgcttggcgaaggctcacggacagatgtgggcactgtatttcttccatagacgtgacatgcgtttagcttacgccgccatcacagcgtgtgtgccgtcgcattggttcccgaaagggaggacttcttggtcagtgcaccaaaaacatgaatggatgacaactgttgacatgcttgaggtgtggaacaatgtctggatacacgacaacccttggatgacgaacaaagaaccagtctcgtcatggagcatggtaccatatctccctaagaaacaggacattgcatgtggcagtcggattggaactactgaccgcacactatgggcgaaggaaatgccggagcttgtctccaaattacgacgtgtcttggacaaacacgaaggaccacaacaatatactgatggtttggctattttgggccgataccaacagtcccccggaaacacggctgacatctacgtgtaaagtggtcttagggcagcacattagtatagctgggaaagtagggttacaatgctttcttgtatgcaactgatgaggtgagttgcgacacctccctgtgagcaacctgttcaaacttttgaagaagtttgaccaaacccggaaatygacaaagtcgttgaagtacagcacaacgattcacttaaaaggctgtacatagagcaaaatccataacaacatcatggtcattctcttaccatcaggagagtggatgaaatgagctgctcactcatttcacaatggcattttagaaataatttgaccattcatattttaccattatcaaaatggactccattgcttgcacaaccaatcctaaactggatggaacgcgagtaatggtggcaaaggagttgggagcactcctcatatgacaagggcaacacarrctatttattgcctgaggtggcgctgctcacctcaggcaataagttgcctgtgttgcccttgtcatatgaggagtgctctcaactcctttgccaccattgtttgcgttccattctgttaagaattggttgtgcaagcaatggagtccattttctgtaatggtaaaatatgaatggtcaaattgattaaaaatgccattgtggaatgagtgagcagctcatcccatccattctcctgatgttaagagaatgaccatgatgttgttatggtttttgctctatgtacagccttttgtgtgaatcgttgcgctgtacttcaacgactttgtcagtttccgggtttgatcaagcttcttcaaaagcttgaacaggttgctcacagggaggtgtcgcaactcacctcatcagttgcatacaagaaagcatwaag

SEQ ID NO: 43 - DNA, 10893 bp, Parramatta River virus
agtttttaaaagttaacccgtggttttaccctagtttcggtgaatttgccaattttacggaataactgtttgaaaggttcaaactctggtgtccaacgtttgtattaaaatgagtggattaggaggccttcttcccctccgagggaagaaaaagaaagcccctgtgatacaatcacagggcagggtcttgccgaagagcgactggaagggagctccgaaacaggatctaaataaaaagaaagcgaaaaaggacgagacgaaaggccagaattggccaagaagaattaacccccggactggacaatggtcggcaattgagggctctggtgctcggctgtggagaagcattttctctacagacttgatcggaggcttgttgttgttgatcgctattttatcaaatctctacgaaaaggttagacgtgacataacggaattgaaacgcagagtgactcgattggaaaaatctcgagctagtttgattttgaccccaatggtgttgctgtgtctggctatcctcgcggcaggcgtgacaatccaagtggttgtcactactgatgcacgaatcgagctttggtctgaccggaagaactttacagctcacgctcacctcgtcaaggttcctaccgacgtttgcaatgatggggtgtttgtaacaaaacattgtcccaaagttgagaagttgagtgaccttggcgaaatcgattgcggttcatcatggtctgaatttaccttgacttacacacgatgcgtaaccttggaaagagcctcacgtgcggaagagaagggaaagacaatgctggggcagttcaaggaggatctttccaccctggaaactgaggcttttttgctgtttaaaaaacatgcgttctcgaccatcctggttttgctagtattggccatcgttatgaagtggcccgtgtgggttgtggtaatactggggattctagcgtggaacgtcgtgaaaggtgagtttgttgagccattcttggttttaaaacatgaccacagtactatgctcatgaccagactgtacccaggagaaatcgctcacgttgcaactcctgccgggttggtggacattcgtgttagccatgcccaaatttttggaggtcaacgctttcgtgagttactgagcgactgctctgtgaacgcttcgtattcgaccgacatatgccccggaggatcacaacttgacttggaatcgatcaaaggtcctggacgtgtctgcatgaccgctccgtacaatcgaggatggggaaccggatgtttcaaatggggaattggagctgttgccacgtgcgttgagttgaactgcacacgggaaacaaaagttgatttgttgacaaattctgctattgtggccaacgtgacagtcaatttccactcgaccaatgacactaaactccttgtgcctgacaccccaattacgttgaagtttgggaagttaggaacgatgacaatgacgtgtcgtttgggaaatgaccgcattgctaacgatttttaccatgtaactgacaatattgcatctggactgttccagaaagctttgattgatgcgtgggaaggaccctccaagatggcgaaccacattagcggacatgaaaaagtcgtgaagtggggtcacattctcccaaatgagatcaaggtcagcaagatcattgaaatggagttagattgggaaaaagcgatcaccacacatgatggattttcgaacacctatttttggtgtcaagtggccgtgaacaagttggtcgttgggtcatttgcctcatgcaagagcggagcgaaggctagcttcatccaatcctcgtggggttttgatggtgtggttgaagtgactttggatgaggccaccaaaaccatttgctccctacccctgacatgtaccggatgtagcttgttggctacaaaagtggttttccttgagggaagccagcgggctgttgggcacgtggggtgtggaaatggaacatcaatgttgacagtaggaacgacaaaggttgggatccaatgtgtggtcacaccggtgtcacaaatttggaacttcgtgactcacgcttccggacgatatgcgaaacttggttttggaggagttggaggagctttccatgatctgctagtgaaggttggattgaccttcacctgggattcatggaagatcatcaccgtgttgtctggtctcgtagtggcttttgccatctttgatcggaagttggtgatcctgatcattatcctctgtggaatcgcttatacccgagctgacattggatgtggcattgattttgacaggaagacctacacgtgtggaagcggtctattcgtgtggaagggtttgggaaaatacccaacggccgaccattctgttgagtttgcctcatatgattttctatcagcgtacctccaggagcagtttaagtctgagaagaaggtttgtattatttgtgaagacattgtccagtgtgaggcagctagaaaagcagccgctgcggtgtataaaaacctaggccacccgtttgtctacgtgaacacgtcggactcctatggaaaagtatttgccgaaatcccgaaaagagtccacactgttagtgtgggagtcgacgttgtggaaatggccatgatgactagggagaacaaaccggttggaccgtttggtgacttaccgcgtagtatggtttcgtggaagagtatccctgaaacagaagagcacccagtgttgagagtgttgacatcttcaagtgattaccagaaggtatgtggaaaagcgattggattccagtatgattttgttggataccgtcggaccatgtatggatctaatgtccagttaaaaatatcaaagaaggtttcgattgaatgtcccacatacttggcaggagtcgccgtgaaaaatgatagaacggttttcactgatggaatgttctggatgtcatcgaaacgtgagaatggaacatacgcgatcactgagttagagatggagcagtctcacaagtgcatctggccagaccaatacactcctgacgccactttgacgccacgtgacaatgaaatgtttgttccgcctgagtggggagggccaatgtcgaaagccaaccacattcctggttacaaaatgcagactggatttccatggaacaaagcccccattcggtttgttgagggaagtgttccaggaaccattgtcacacagattagtcactgtgatggtagagggattgcagccgaagtgaatccagcaacgcagcccaattggtgctgtaagtcctgtacaaggattttccactttgaagtcgatgggaaactctattatccaatggagattcggcccgacccgaaaggaggggaacagcaaaaagttcctgtagtggagacacccattggagatgaagaaaccgagactgttggtggatggctgggtagaatgtataacattccaggagctgagggatcatatgcggattttcgactccccaagttgccaaattcaagaccaagcgcaatggtggggagtttggtcaatctattatgcttgatgttttcaattcagatagttaccaagactatgcgggcaagaacgcttatgcgtttctatctttgttgcttggtttttatgttctttggaatgccaactttgtttggattaagtgggtttttggcgtggatgatgattctaccaatctcacacaactcggtaacaatgtgcaacctaaccgtgcatctgtgggctgtactgctaaaccagagctcggcgatgtttctgtggggcctaacgctccgatcccagatacagaggtctaccgctggacagatgctactctttaccatgcagatgttgcatcacgccatctacgcgcactcttgggtgttcgggtgggtcatcgaagtatgcttgtcagtcgggcttatgatgaacttgttaaccgtcatcgatacggttcacccgaaactgatcgcatacttgctcttcttcggatggaaaacgggcatgtgcgtagtgtgcgcttggttattgatatactcaatcaggagatggaactctatagtcgccgcggctccggccgcgggcgggtggaggtcagggtatcgaacaatgatgtcctccagtttgattgttatctttatcagtgtaggaattgcaggagttatcgcttcggactatggaggttatccggctgcggctgcggtgactgcagcattgttgataatgggaatcaaaatgtttgactttctgacgacccgattgtctcttgagttcgtatctgcaggcatgttccccgaaggtgttgaaaaagcctttgaaccggactcggtcagtgacttgtttagggcatctttcactgtagatgggataaagttgcaggaccatgttgaaccgatccccattttgtttgccattttgtacatctttattggagctgtggcctgtaaggttaacccggccctcggaatagtgtatgctatcgccatgttcgcgactcctttaccggagttaatgcgtttatacatgatgaccatctattcctctacatttcggacagacactctgcttgggatggctatcccagaaacggagccagaactgtctcaagactttgggccaatccctgatgggatttatcgggtgaacaatcatggattttcagtgaagagtcatcggggagttggaatcgtaaagaatggggtttttcacactctcatgcatgtcacgctcaatgagccactcgcgtggcaaaatcgcctagtaggaccttcaatgggccactctctcaaggactatgtcacatacggtggaaactggcaattgcctgactttgatattgttaatgaggtgggcataatggtttgtggacgggatcgttccattcagtacaaaagacacgaggttgggacaatcatgatcgacgacaagcgagtgatgtacttcactcatgattacgggcacggatcatctggttcaccaatttttgtgaacggagaacctgtggccttatacggcttcgggttccatttgtacaataggtatcgatcaatagttctgcctatcccacgtgaagaagtccttgatggggctagtaatgagggcataccagctgagcacggaaccatgcgcaacaagttttttgttgactggcatccaggaaaagggaaaacccgaaaagtgatcgttaaagaggtgttaaatgctttgaatttagcacggcggattgttgttctggcccctacacgagttgtcctggctgaaataactaaggcaataggggaaaacacatcaaaaacgccctcaaaaaatcttgctttcaccggtcacaatattgtgacggtggcttgccacgcgacgttcactgattatgttttgcgtcatgggttatcaaaattcaaagctcacgaagtcataatggatgagtgccattttctggacccacgatctatagctgcgagaggaatcctggagcatctggcaactaaacgtggagttaaagtcacgtttatgagtgcaacgatcccaggacgtgaaccttcactcgggtcgaattttgagatctctgaacaggccttgcagtttccccgtgacgtcaaccaaaggtggatagaaactgttgctaggggaaagaccgttgccttcgtgccatctcacagggtaggtgacaagctagctcgcgggtgtccccaagccatttccctgcataggaacaattttgacaccaattacagcacagctatggatgagtccataaaatttatctacaccactgacatatcggaaatgggagccaatttcagtgctgacaccgtcatagatttccgggtggcgattaagccaaagatttctagtgaatttgccgtcactcttgaaccaactccgatcacgcgatcatcgatgattcaacggcgtggtcgagttggaagacaacgacctggaacctatatttacccagttgacaaaggcgtcgaagatgcctccgatcagttggcttgttggacagaagctcagatgttgttggatcaattggacttgacaatgatggcagaggaagttcggcagtcaaacattccaggggcttacaaattagttgggcgtagcctagacatatttcggaagttgctggagaaggatgacataccaatctggctgagctggaagtgggccgacagtgttcaacaacaatactccatattgtttgaaggagaacgtcaagagaatgtcgctcgtgtcgtcaacactcgagactatgcttctctagagtataagccgaagtttgttgatgcacgattcgagcgtcttggatgggatcaacgaaagctgtcaattcagttttacatgaacactcggagcttcataactttcgccactttgtcacacgtcatttctcaagtgatcgaagctggagttgtcaattctgcttggaagcgaataggagacgttagcatcatctttactgaaggaggcgacccacatgctaaagatgaaactatcatggcttggactattctggttggaggagtgttgggggctcttggattcctcatagttgcatggggaatgaaggctgtcttgcgagtaattttcggatcccgcgataagcatcttagcgtcccaaccttagtggcggatttccaaccatacatagtgtgtatagttcccattgccctacatcttgctggggttcctataccaatgacaattgtgtttttcgcgatgcttttcttgacttatccactaatgtacaagagtgccggacaacggagttatgttgacattgacttggtgaaatggattctgttaggtggatgtattgtaactggagtcatttgctgggaaatgagattgctcccaaacatctcatcagacatttcagctattttgaataggcaaagacaaagggaagacaccccaacttttgatgcttcaccaccttgggaatggttggatttagcacagccagtccctcacaatgttgaattgacgtcagtggtgataactacattcacgacctgtctgttcttgcaccaaattgtcggatggtcatacgagtcagagtggctgaaatcctatttcgaccacaaaggagtgggtcagatcatgggtggttttcggttggacacaatttcatggggatcagctctaagcggtcttctgggcacagctacttatgcctcatggggagccattttgactgggttaggaggagcggttgtgtattttttcctgatggtttcaatgctcaagtggaacttttcgggaggagccacaactggcttagaaaacaatgtcatgcgaaacgaccgagaaactggactaggtaatcggccggcaaacgacaataggcgttccctcctgtacggtgtggtggcggctgaatgtcttgtgtggttgttctgtttcagaactgccacggatgccatagtggtggcttgtttagtgtcctattgtttatggatcatcaacaacccggctagccctcaccacaaaaacactgacttaggatcggcgtgtagtttcatcggtcttttgtactgtacatgtcctactcaaaaatgcatccaagtattgatgaggtttgctttggccaggttgaacatgaacacccgctctctggaaaaaagcgcgacgggaggccttggacaccgttggaagaagctattaaatgcgatgacactattggaattcaacgcttaccgatcttgtggagttgacgagactgagaagggtgactatgtgtcacgaggagggctgaagctgagagagataaccatgaagtatggttggaagccagaagggatatgtgttgatcttggatgcggcagaggaggatggtcacagcacttggctatggatccccgcgtaactagagtggaatcattcacgttaggaggaacagcacgagaaaatccccagccaatcaagacacttggtcataaccttatccggttcaagagtggagtcaatgtgtataatatgacgccaacacatgctaacaccatagtgtgtgatatcggagaaagtgaccccaaaccagaggtggaaacctctagaacattgcgggtcctcaaaacacttgaactatggttggccaggaatccaaacgctgaatttgtgtgcaaagtcctttgcccataccccgtggaagtcctcaaatgtctggaaacccttcaacataagtatggcggaagaattattaggtcgacgtatagccgaaattcaagtgctgaaatgtattacatttctggaggccgtaacaacatggtgaaggttatcttcaccaccctccactccttgatttcgaggatacgaactaggccggagaaaatcgtcaaagaaagtgtttctctaccagttgggactagaagcgatccagggcacaagatcaagagtatggatccaaagatgatagcaacgcgggtggaaaagataaaaaaggaacatgcggacacgtggttcgttgacaacaaccatccataccaatcatttcggtatgtgggatcgtacgtcacagatgatgtgacaccaggaggtcagactgtcaacccattaatgagaaaaatgatgtggccgtgggagactgttggaggagttgtaaatttcatgatgacggacgtgtccacatatgcccaacagaaggtgttgcgagagaaggtcgacacactatcccctgaacctccaaacgacattcaaagggttaacagatggatcaccgagttcttgtgtgcttcattcatgcgtcgagggttgaaacctagaatcctgaccatggagcaatatatcaacaacgtaaagagctcagctgccattggatcgtggagcagtgatgtcccgtggagcagtgtccgagaagctttagctgataaaagattccaccaaatggtcgaggaggaaaggaaactccacttagcaggagactgccgcatgtgcgtgtacaacaccatgggcaagaaggagaagaaaccttcagccatgggcgtggccaagggctctcgaaccatttggtacatgtggttaggttcacggtttttggagtacgaagcccttggcttcttaaatgaagatcattgggtgtcacgagacaacttggcatgtggtgttggtggagtgggagtgaattacttcggctactacctacaagaaattgcacggaaagggaagttttttatcgccgatgacatagcgggatgggacacgcggatcaatgagagtgacttggccgatgaggaatttctcatcatgtccctcatttgtgacccataccatcgatcacttgcaaaagccgtgtttcggtttgcctaccagaacattgtggccttgtttccgcgaaatcatcctgggtttggaagtggaacggtgatggatgtcgtggccagaactgaccaacgaggttcaggacaggtcgtgacttacgctctaaacacgataacgaacgccaagattcaattaggcagaatgctggaagccgaaggattactagacgctcatgaacatgtaatcaaaaaatggttaaacgacaatggtgaagaggctctctccgggatggtggtggccggggatgatgttgtagttgcgaccaacaacggaaatttttcaaggtccttacgatacctccatttgaacgggaaaattcgtaaagacattgatccgtccctaccgtccaaagttgaaacgaactgggaggtggttgaattttgttctcaccattaccacgtgatgaccttaaaggacggacgacgaataattgtcccatgccgagagcagaatgaaatcattggacgaggcaggattcaaaaaggagggttggtgacccttgccgaaagtgcctgcctagcgaaggcttatgggcaaatgtgggctttgtatttctttcaccgaagagatctgcggatggcttttctagccataacttcgagtgttccaatagactggttcccagagggccggacctcgtggtcgattcaccaaaataaagagtggatgaccactgaggacatgttgcgggtctggaatacagtgtggatccaggacaatccctggatggaggacaaaatggaaatcgaaaattggagggacattccgtacctcccgaaatccatggacctaaagtgcggcagtctcattggaacaaaagaaagagccgcttggtcaaaggatctgccgtcaacggtcacggcagttcggaaaattatcgaccaagacacgaaaaccgagaatgtctaccaagactttcttggcggaatgggccggttccaaacgtacactgaccccatggcaacgtaagaaaccatcttttccaaattagtcgaaaaattttgcccctcttcgaggggctttggcggcagcaggagattttctccggggtttcacgctccccccgatgccagtggtcacagcccaagtcagagacttggagttgtggcgggacagtgagctctgtcagtggtcaatagctcaataaatatggcagcagagcttgtctcggggattcacgctccccccattgtgagtgtgtcgaactggtttcgaaggacgtctagaacgacgctaaagttcaaatccggcaacagagagtttatgtctcggggcctcacgcaccccccgttgtgagtgaagtcctttctggccatttagtggtcaggaagggtaccgttttggaacgacggaaataagttccatggagcgacactagccccactgaggggcggttggaatgacacccaacccgctatagtgcgtcgacaggtcaattagctacctggaataagctaatgtgcagggcaacaaagttctaacgaactagggtgagtagcgtcaccccccggttgtgaaaacgattgcgactagaactaaagtcgagagtctccccaccgataggggagctcgtcagtttgttttagtccaattacgct

SEQ ID NO: 44 - DNA, 10682 bp, Cell fusing agent virus
acttcggcttagctacaccacagttttggttacgcttatattttcaaagcttaagttgtttttaatttttgccgagagaccgtgaggttgaacccggcaaggaatgaagaggaaggatttggaggcgcgaggaaaagcgccagggagggatttttccaccccgttctggggaagagaaggtaggagaaaggacaaggaaaagggaggggagtctccctcaaatcggcaagtgaccctgaatacacccatccagagtgggcgtagggcagggaaaagacagcgtgttggcctgctaggaaggctgggagttggatggggatccttcttacaggaggacatcgtccaagccctcattcacatggcattggtgcttcatgccctgttttcctccatcgaccggcgaattcgctcattatctcgacgtgttaccgctcttgaatctcgacgaaccacaggagatcctatgacgctagctttcatcttgggctttctcacagtgttatgtggatgcgtggtgattgacatgcaagtttctaccgctaagggcacggaaatttttgaaggaaagacgaaccggacagactacttgcatctggtcaagttacccgctgatggttgctggagtggcattcttgtcacaaagaagtgcccaaaagtgactgacttggcaaaggacctcgagtcaacagattgcggatcaacgtggactgagttcacattgcggtatcggagatgtgccgtgaagaaacgtgaaaagcgatcacgtgaacccccgaaagcggatctgctagctgaaatggagatcatcgcgttcaagaccattcgcgaaaataagacgattttcatcgtggccctactgtgtgtggcaatcgcgaagcgttggcccacctgggttgtgattcttctggctattggcacttggaccacagtaaagggggagtttgttgaaccgttatacacgctgaaagcggaacagatgaccatgctacagaccattgtgagaccggaggaagggtacgtcgtggccacgccaaacggtcttctcgagtttaaaacaggaccggcggagatctatggggggcaatggctgcgcgagttactcgcagactgccacgtcaacgcatcctattcgactgacgtgtgtcccggtggatcgcagctcaacatggctgacatcatggccaaggaacgagtatgctcgacccagccatacaaccgcggttggggcactgggtgcttcaagtgggggattggattcgttggaacgtgcgtcgaactccattgcgacagaggattcaacgtttcttccatcgctaggtcagccattgtcatgaacgttacggctagcttccactctgttagcgacacacaacagatggttggcgacataccgcttacatttaggtttgcgaaactcggaaacgcggcgatgacctgcaggttggagtctgagcagttgctgcttgattactatcacgttacgggaagctctcacgaggggctgtttttgcggtcgcaaattgacagttggcctggtgtgcactctaccgctagtggtcggcatggcatggagaaagttgttgtgtggggagatgctaggtccaatgagatattggtaaaaaacgtaattgaaccttcgttgtcctgggaagacgcgatcgccacccatgatggattccgtgatatctcttttgtttgtcagattatgctcgacaaactagtcagtggagcttttcgagactgtccaggcccaaaaacatccacattttcccaagacggctttgggtatagtggagtggtgataactaccctcaccgcttcttcaaatgagacctgttcgcttagcttaacgtgccacggctgtctgctgcaatccacaaaaatgatctttctcgcagggaagacaacttctcgggcatttgtcaagtgtgggaaccatacgagcaccttgctcgttgggagcacttcagtttccattgagtgtgcccttaaccctatctcgcaaggatggcgcctggctcgacacgtggtggataggtatcgacggtttggcgtgtctggtgttgcgggagtgtggcaggatctggttggaaagttttcggttggtgcctttttctccaacacaacccttctagtcattttcgtcctcgctgccttgattgacaaacgcatagcctttctgttggttttaggggggtacttttactatgtgcgggctgatctggggtgtgggattgacaccacgagaaaaaccatctcgtgcggcagcggcgcttttgtgtggaaacacttgggcgttggcatttccaatgatcatgctgtggaacttgaagattactcattcactgacttgtacataaaggatatgtttagctggaccacgaaaccctgcttgatttgtgaggatgctttgcagtgcgtagccctgcgcagagctgctttctctgctgttgggtcaatgggtcctgaacaggtgtatgtaaatgacacattggcacgtacattcaagttctccgaaacaccaaagagaaccatttccgtcaccattaacctaattcagtacaagttctcatcttatgttgcacatggacgcgctgagggtgatctggggcatctaccaacaatgtttggaagctatcccgaaaaagaggctgataaggttatccggattgtcgcatcgcggcccgatattcgccgactttgcggaaaagctgtctctttccaattcaagtttacgggcttccggcgaggcttgtatggttcaaacgttcaggttgaggtctcaaagaactcatcgaccgagtgtcccacgtacctggcgggcgttgtcgtgaagaatggccgaactgtcatcactgacggcatgttttggttggaaagcacagtgttggatggagttgcccagattacatcacttgagatgcgtcaatcacaccgctgtgtgtggcccagggaatacaccccagacacgctcagtgacccttcagaccaagctttatttattccacctgcttgggggggaccaatttcgcgagtgaaccacataatcgggtacaagacacaaactgactttccgtggaacgttagtgacatcactctcatagagggcccagcccctggcacaaaggtcaaggtggactctagatgtcatgggcgaatgcacgcacaggtaattggaccgaatgacacggaatcctggtgttgccaatcatgcacaagaatagtccactttcgagttggtgacctcctatattaccccatggagatccaacttggaaccatgtctgaagcgccagagccgaattctaaaatatttgaggaaccgatcggcgaggaaccagaaccaacagttgacgacatattgaagagatacgggaaggcaaacgctcaatcggatttccggagggtgagcccacgtgcaggagttgggttcgaccgctccctcctaaatctcctgtgcctcgctatttcattgcagcttatcggggcaaaaaccagaacatcgacactaacccgtctatttctgacgattctagcaatggcgctctttggactccccaatttgttttcatctgtggggctatctgcttgggtgttgctagtggcgtcctcatcatcgcaaccgcaagatctattgatgaatctctggatcatactacagactgggagctcagcagtcctgctgttggggtacatgatcaggaagaaactctcaatagtgctaggggtccaccacttggtgactttgatgtgcattcagttcctgttctccgccgtcgatcgctatcagaaatatctctacggtctcctagaactcatggcttcggtggtcctgctgagcgcctacaagagcgtcctgcaggctctccccccagaggttctatgtttcagcctgataatggggtggaagacagccctgtctctcgctaccgttgtgtctctgatcttcagtttgaacgctatgtacaagtacgcatgtcaatatcacaatccgaggaacggctacagagactctggcgcgaatttatggttttggactgtatccttggcgagcgctgggggaatctgggcggcggagaaagctcaccaaccaacggtggcagctgtcctagcctttacaatgatagtgctctttctttacatggaacagacgaacgtcagtatggagcttgagttcatctcagctggagagactcccgaaggagtgtcaaccgaaaatgatgacgggatgaatattcctgacttaaaagggcgctatggggaggatgggatcgtcgtgggggcggcctcatcgtctggccacctacccgagctcgtgtttgtgttcctcctaggttttgccgtgacgtccacttcatactttttgggggcgctctacctgctcatcgcaaccagcactaaccttcccgtgaccataatacggatgctgcgtatgaagctcactgccaacaaccgatctgatgatctcttgggactcggcggacctattgaaactgatctccagaccagctttcaagacattcccaatggagtgtatcgcatcgttgttcgcagcttatttggcgaccggcaacgaggggctggcttctcgaaaaatggggtgtttcacactctcatgcacgtcactcgaggtgaaccagttaaatggcgtgggcgagttgtcgttcctcactctggtagtgccttgcgcgacgtggtgtcgtatggtggaccttggcagttggacacccccactaccacggaagacctcgtgctgatggcttgcaaaccggacaagaccgttgagtaccatcggtacaggccgggagtcatgagtattgacggtgaacctgtcatgttcattagtgatgatttcggaaaaggatcttctggctcaccgttcttcattaatggcgagcccgtcgggttctatggttttgggttctatgtgaacggcatttatcgctcaacagtagcaggtggtaaaccaaccgatgtcacggagaacttggactgtgattcgaccaggcggttcgtgacatggcatccgggaaaaggaaagacgcgcaaggttattgtcgaagaaactaagaagaactatgattccaaccaacggaccgtgatcttaacacccacccgggtagtcatggctgaggtcgttgaggccttgaagaactcaggcatgaggagtgataagaacctgtcgtactgcaccaggaacctgataacggttgcatgtcacgcaacgttcacgaaatttgttcttagccatggcgccaagaaagtgcgggttgccatgatcatcatggatgagtgccatttcatggatcctatgtccattgctgcgcgcgggatcatggagcatctccacagccaaggaacaaaattgatttaccttagtgcaacaccacccggccacgcgcctgatacaggctcgaattatgcaataagtgaccaatccattagcttcccaacctggttgagtccagcgtggataggaaacgttcaaaaatccgtgggggcgaagaagaccattttattcgtcccatcgcacaaccaagctaacaccctggctagtgctattcctggatccgtcccattgcatcgagcaaacttttccactaactatgcacaagcgggtgatgcagccaccgccctggtaatctccaccgacatctcagaaatgggagcgaatttgggcgtcgatctggttatagacactcgaagagctttgcgaccccttgtggattctgccacgcgtgtgaagctggttgaaacgaacataaccacatcatccatgatccagaggagagggaggacgggaagacgggaaccaggaacgtatgtgtatcctattgatagccaaacggaggaaaatccagtgtcttgggcgtgttggcctgaagcccaaatgatactggaccagctcggcatgacttttatgctagaggaagccgcatacagccaacccccggggagattcaccctagtgggagaggatagaatgcgattttcaaagcttatggaccgggatgacattcccatttggttggcgtggcactgggcagaagctggggaccgacggcactcagccctgtttcagggcgaaggaaccggaaagatcatcgagaaccgatttggcaaacaagagtatcgaccacaatacgttgatgaccgctttgagagcgttgagtgggagacgcgcaaggtgtccattgatttctacatgaactgccgcggggggcctagcctctatgagtttttcacattgattgattggactgacatatggaggagaacgacatctgctctttgggatttgagtgacgtcatgaatggagaactgcgtgaccggtccacaactgagcgctcccttaccgtgctaatggcttttgtcttgggcgtctcaattgtgctctcctgtttcatcgctgtctgggcattgtgtttcctattctccttgtttaggccgcgaaaggtaacttatgagcaaatgccatctagtgacccacttagcggtggtgtcttggtgtcaacccctagcctcctttattatatgggagtccccttggggttctgcgtcgtcatatcactggctatgttcttggtgtacccagtattgtacaagtcaattggaaatcgcagttacatggacagcgatttggtaaagtgggtcatcttgggatcatgtctgatctgcggagtgctggcttgggagatgcgaatgttcccgaacatacgtggcgacctcatggagctcgtgaaagctgtcaaggagcccgaggaggtcgtgaattccgggccattttttccaagttgggaaatagcgcggggaaagggagctacaatgttggactctctgcaggtattcttcttcataacagtgttgtcaacaaaattcttgtactggttccaggagaactggactgcacgaatgtacgccatgaaacatccggagatggttagctcgattggtggattcagatttgatgaaattccattcagggcagtccttccctctggttttgccattgtcgcgattgctagcctctcaagtgtggtggtggggcttctggcagctggtgtgttcatggccatcatgtactgtcagaacaagtggaatgccaccccaaagatcttgacagcattggacgctcgcgaccagagacatgatcgtcccactgaaatcactagtagagtgccactcgaaaacactcggtccatcatgtatgccttttgcttgatcttcagcctgttttgggctttctgcacacggtctcctggagattttctccgagggtcattggtggtcggggctagcatgtggcaaattctccatccccggtcaaagatccatgatgtcatggattttggctccatggtgtctgccatagggttgctagaaatgaactaccttttttataggttcatgcacattgccgctagagccttgggcgcggtagctcccttcaaccagtttcgagctctggaaaagtcaacaacgatcggtctgggaatgaaatggaagatgactctgaatgctcttgatggagatgcattcacaaaatacaaatcacgcggggtaaatgagacggagcggggtgattatgtctctcgtggcggcctcaaattgaatgaaatcatctcaaagtacgaatggagaccgagtggtcgagtggtggatttgggatgtgggcgcggtggctggagccagcgagctgtgatggaggaaacggtgtcctccgctctcgggttcacaataggtggggcggaaaaagagaatcctcagcgattcgtcacgaagggatataacctggctacgctaaaaactggagtggatgttcataggctcaccccattccggtgtgacaccattatgtgtgacatcggagagagtgatcccagcccaatcaaggaaaagaccagaactctcaaagtcttgcaattgttagaaaattggctcttggtgaacccgggagcccattttgtgtgcaagattctatcaccatattctcttgaagtccttcggaaaatcgagtccctccaacatctgtacaatggcaggttggtgcgcctctcccacagtcgaaatagctcggctgagatgtactacatctccggggctaggtctaacgtggtgcgcaccacatacatgacgctggccgccttaatggcccgcttctcccgacacttagacagcgttgtcctcccgagtcctgtgttgcccaaaggcacacgggctgacccggctgctagtgtggcatccatgaataccaacgacatgacggaccgtgttgaacgcttaatgaacgagaaccgtggaacatggtttgaagatcaacaacacccctacaagagtttcaagtattttggatcgtttgtcaccgatgatgtgaaggtaggagggcaagcggtgaaccccctcgttaggaagatcatgtggccatgggagactctcacgagtgtggtggggttttccatgactgacgtgtcaacctactcacagcagaaggtactgagggagaaggtggacactgtcatccctccccacccacagcatatacggcgggtcaacaggacgattacaaagcattttatccggttcttcaagaatcgcaacttacgaccgcgtattttatcaaaagaagaattcatcgccaacgttcgaaatgatgcggctgtaggatcgtggagcagggatgtgccatggcgagatgtgcaagaagccatacaggaccagtgcttctgggatctcatcggaaaggaacgggccctccatctgcaagggaagtgtgaaatgtgtatctacaacaccatgggcaagaaggagaaaaagcccagcctagctggtgaggccaagggctcaaggaccatctggtacatgtggcttgggagccggttccttgaatttgaggctctaggctttcttaatgcggatcactgggtcagtagggagcacttccctgggggagttggaggcgttggtgtcaattatttcgggtactacttgaaggacattgccagcagaggaaaataccttttcgcggacgacattgctggatgggacacaaaaattagcgcggaggatctggaggatgaggaagctctcctaacagccctcacggaagacccccaccacagagcgttgatggcggctaccatgcgactggcatatcagaacattgtggccatgttcccacgaacacactcaaaatacggcagcggcacggtgatggacgtcgttggccgtcgggaccaacgtgggtcagggcaagtagtcacatatgcgctgaacaccataacaaatggtaaggttcaggtggcgagggttttagaaagtgaaggactactgcatgcggatgaatcggtgttggatgcgtggttggaaaaacaccttgaagaagctctcggaaacatggtcattgctggagacgatgttgttgtgtcgacagacaatcgcgatttttcatctgctctcgaatatctcgagctgacgggaaaaactcggaagaacgtcccacagggagctccctccaggatggagagcgactgggaaaaggtggagttttgttctcaccattaccatgaaatgtgcctgaaagacggcagaatcctcatagcaccttgcagacatgagaacgaagtgcttggtcgtagccgattgcaaaagggaggggtagtcagcatctcggagagtgcttgcatggccaaggcctatgcccagatgtgggcattgtattttttccacaggcgtgatttacgcctaggtttcattgccatctcgtcggctgtgccaaccaattggttccctctaggacgtacctcgtggtcagtccaccagcatcacgaatggatgaccactgatgacatgcttcgggtttggaatgacgtgtgggtgcacaacaacccgtggattctaaacaaggagtcaattgaatcctgggatgacatcccctacctgcacaagaaacaggacataacctgcggaagcctgataggggtcaaggagcgcgcaacgtgggcacgagagattgaaaatagtgtcatcagcgtccggaggataatcgacgcagaaactggggtcctgaacacctacaaggacgagctctcagttatgagtcgatatcgaagaggaaatgatgtcatttagacgaaatcgaatagagccgtgaggaaccagcatcctcccggccacaggagcagggcatgaaaatgtcgggcatgacgaacccgctcccccgagtcccctggcaacagggtgtgttcccttatggagcacgttcgagcagggcacattagtgtcgggcgtgacgcacccgctcccctcagtcccctgtgcaacagggagggcacttgtaacccccgtaggagggtgcccgcttccgtcctacaaaaacctctgatcataggtacctgatctaagatggtggtggcggcccatcttatcatttagctagctgatggtcttaagcatccctcccatggaatgggtaagagaagcctgcaaacaaaactggatggcaccagtgctcttacaaaatggcagccaaagcgatccagagctttcaaaactggacggggcaacagggagaaatcccggggtagcgaacctcctccgttaatgtgaaaaagtatggggaaagaactcatcttaacctcccaccgttagggagttttgattatcttttctataccatagatgc

SEQ ID NO: 45 - DNA, 11022 bp, West Nile virus KUNV subtype
agtagttcgcctgtgtgagctgacaaacttagtagtgtttgtgaggattttgaacaattaacacagtgcgagctgtttcttagcacgaagatctcgatgtctaagaaaccaggagggcccggcaaaagccgggctgtcaatatgctaaaacgcggaatgccccgcgtgttgtccttgactggactgaagagggcaatgttgagcctgattgacggtagggggcccacacggtttgtgttggctctcttggcgttttttaggttcacggcaattgctccgacccgggcagtgctggatcgatggagaagtgtgaacaaacaaacagcgatgaaacatctcctgagtttcaagaaggaactaggaaccttgaccagtgctatcaaccggcggagctcaaaacagaagaagagaggaggaaagaccggaattgcattcatgattggcttgattgctggcgtgggagcagtcactctctccaactttcaagggaaggtgatgatgacggtgaacgctactgacgtcacagacattatcacgataccaacggccgctggaaagaacctgtgcattgtcagagctatggatgtggggcacatgtgtgatgatactatcacctatgaatgtccagtgttgtcggccggaaatgatccagaagacattgactgctggtgcacgaagttagcagtctacgttaggtatggaagatgcaccaagacacgacactcaagacgcagcagaaggtcactaacagtgcagacgcatggagagagcaccctatcgaacaaaaagggggcctggatggacagcaccaaggctacaaggtacttggtaaaaacagaatcatggatcttgagaaaccctggatatgccttggtggcagctgtcattggatggatgctcggaagcaacaccatgcagcgtgtcgtgtttgccgtgttactgcttttggtagctccagcttacagctttaactgtcttggaatgagcaacagagatttcctggagggagtgtccggagcaacatgggtggacttggtccttgaaggtgacagctgtgtgaccattatgtccaaggacaagcccaccatcgatgtgaagatgatgaacatggaggccgctaacttagcagaagtccgcagttattgctacttagccactgtcagtgaactctccaccaaggctgcgtgcccaaccatgggggaagcccataatgacaagcgggctgacccatcttttgtgtgcaaacaaggagtagtggatagaggttggggcaatgggtgcggactttttggtaaaggaagcatcgacacatgcgccaaatttgcctgttcaaccaaggcaacgggaaggactatcttaaaggagaacattaagtatgaggtggctatctttgtgcatggaccaactaccgtggaatcgcatgggaactacttcacgcaaaccggagctgctcaggctgggagatttagtatcacccccgcggcaccctcttacactcttaagctcggagagtatggagaagtaacagtggactgtgaaccacgctcagggatagacaccagtgcatactatgtgatgactgtcgggacaaagactttcttggtccaccgtgagtggtttatggacctcaacctcccctggagcagtgctgaaagtaatgtttggaggaacagagagacgctaatggagtttgaagaaccacacgctacgaagcaatctgtgatagcattgggctctcaagagggagccctgcatcaagctctggcaggagccattcctgtggaattttcaagcaacactgtcaagctgacgtcaggccacctgaagtgtagggtgaagatggaaaaattgcagctgaaggggacaacttatggcgtctgttcaaaggccttcagattccttgggactcccgcagacacgggccatggtactgtggtactggaactgcagtacacaggcacggatggaccctgcaagatacccatttcatcagtagcttcattgaatgacctaacgccagtgggcaggttagttaccgtcaacccctttgtctccgtgtcaacggccaatgctaaagtcctgattgagttggaaccaccctttggagattcgtacatagtggtgggaagaggagagcaacagatcaaccatcactggcacaagtctggaagtagcattggcaaagctttcacagccaccctcaagggagctcagagactagcagctctgggagacacagcttgggactttggatcggttggaggagtgtttacctccgtgggaaaggctgtccatcaagtatttggtggagcattccgctcattgtttggaggcatgtcttggataactcagggtctgctgggggccctcctattgtggatgggtattaacgctcgtgatagatccatagccctcacgttcctcgcggttggaggagttctgctctttctctccgtgaacgtgcatgctgatactggatgtgccatagatataagtcggcaagagttgaggtgtggcagcggagtatttatacacaatgatgtggaagcttggatggaccgatacaagtactaccctgaaacaccacaaggtctagctaagatcattcaaaaggctcacaaggaaggagtgtgcggtctacgatcagtttctagattggaacaccaaatgtgggaagcagtgaaggatgaactaaacactcttttgaaggaaaatggtgtggaccttagtattgtggttgagaaacaggaggggatgtacaaatcagcacctagacgcctgactgccaccactgagaaactggaaataggctggaaagcctgggggaagagcattctgttcgcaccagaactggccaacaacacttttgtgattgatggtccggagaccaaggagtgtccaacccagaaccgtgcctggaacagcttggaggtggaagattttggattcggcctcaccagcactcggatgttcttgagggtcagagaaagcaacacgactgaatgtgactcaaagatcatcgggacagccgtcaagaataacttggcgatccatagcgatctatcctactggattgaaagcaggtttaatgacacgtggaagctcgaaagggcggtcctaggtgaagtcaaatcatgcacgtggccggaaacacataccctgtggggtgacggggtccttgagagtgacctaataataccaatcacgctagcgggactgcgaagcaaccacaaccggaggcctgggtataaaacacaaagccagggtccatgggatgaaggtcgagtggagattgactttgattactgtccagggacaacggtcactctgagtgagagctgcgggcatcgtggacctgccacccgcaccactacagagagtggaaagctgataacggactggtgctgtaggagctgcaccttacctccattgcgctaccagacagacaatggttgttggtatggcatggagattaggccacagagacatgatgaaaaaactcttgtgcagtcacaggtgaatgcctacaacgctgacatgattgatccttttcagctgggccttctggtcgtgttcttggccacccaggaggtccttcgcaagaggtggacagccaagatcagcatgccagccatactgattgccctgctagttctagtgtttgggggcatcacttacactgatgtgttacgctatgtcattctggtgggggcggcctttgcagaatccaactcaggaggagatgtggtgcatctggcgctcatggcaaccttcaagatacaaccagtgttcatggtagcatcatttctcaaggcgagatggaccaaccaagaaaacattctgctgatgttggcagctgctttcttccaaatggcttactatgatgcccggcaaattttgctttgggaaatgcctgatgtattgaattcattggcagtggcttggatgatattgagagcgataacgttcaccacaacatctaatgtggtcgtcccgctgctggccttgttaacacctggattgagatgcctaaacctggatgtgtacaggatcctgctactgatggttggaataggcagtttgatcagggaaaaaagaagtgcagctgcaaaaaagaaaggagccagtctgctatgtttggctctagcctcaacaggattttttaaccccatgatccttgctgctggacttgtcgcatgtgatcccaatcgcaagcgggggtggcctgcaactgaagtgatgacagctgtcggcttaatgtttgccatcgttggagggcttgcagaactggacatagactccatggccattccaatgactatcgcagggctcatgtttgctgcttttgtgatctctggaaaatcgaccgacatgtggattgagaggacagcggacatctcctgggagggtgatgcggaaatcacaggttccagtgaaagagttgatgttcggcttgacgatgacgggaacttccagctcatgaatgatccaggagcaccttggaaaatatggatgctccgtatggcttgcctggcaatcagcgcgtacaccccttgggctattttgccttcagtagttggattttggataactctccaatacacaaagagaggaggtgtgctgtgggacactccctctccaaaggagtacaagagaggggacacgaccactggtgtctataggatcatgactcgtggattacttggtagttaccaagcaggagcaggcgtgatggttgaaggtgttttccacaccctctggcacacgacaaaaggagccgctctgatgagcggagaaggccgcctggatccatattggggcagcgtcaaggaggatcgactttgttatggtggaccctggaaactgcagcacaagtggaatgggcaagatgaggtgcaaatgattgtggtggaaccagggaagaatgtcaagaacgtccagactaagccgggggtgttcaaaacacctgaaggggagatcggggccgtgactctggatttccccactggaacatcaggctcgcccatagtggacaaaaacggtgatgtgattgggctttatggcaacggagtcataatgcccaatggctcatacataagcgcgatagtgcaaggtgaaaggatggatgagccggttcccgccggattcgaacctgagatgttgaggaaaaaacagatcaccgttttggatcttcaccctggtgctggtaaaacaaggaggattctgccacagatcatcaaagaggctataaacaggaggctgaggacggctgtgctggcgccaactagggttgtggccgctgagatggctgaagccctaagaggattgcctatccgataccaaacatctgcggtggccagagagcacaatggaaatgagatcgtcgacgtcatgtgccatgcaaccctcacccataggctgatgtctcctcatagggtgcctaattacaacctatttgtgatggacgaggcccacttcaccgacccagccagcatcgcggctagaggatacatttccacgagagttgagctgggggaggcagctgcaatattcatgactgccaccccaccaggtacctcagacccatttccagagtccaatgcaccaatatccgacttacagaccgaaatcccggaccgagcctggaactcagggtatgagtggattacagaatatatcgggaagacggtttggtttgtgcctagtgtgaagatgggaaatgagatagccctctgtctgcagcgcgctggcaaaaaagtcatccagctaaacagaaagtcgtacgagacagagtatccaaaatgcaagaacgatgattgggactttgtcgtcacaacagatatatctgagatgggagcaaactttaaggcaagcagggtgattgacagccggaagagtgtgaaaccgactatcatcacggaaggagagggaagagtgatcttgggggaaccatccgctgtgacggcagccagtgcagcccagagacgaggacgcattggtaggaatccatcacaagttggagatgagtactgctatggagggcacacgaatgaggatgactcgaactgtgctcactggactgaggcacgaatcatgctcgataacatcaacatgccaaacggattgattgctcaattctaccaaccagagcgcgagaaggtatacaccatggacggggaataccgacttagaggagaggagaggaaaaacttcctggaattgttgagaactgcagacttgccagtatggctagcttataaggtggcagcagctggggtgtcatatcatgaccggaggtggtgttttgatggccctaggacaaatacaatccttgaagacaacaatgaagtggaagtcatcacaaagcttggtgaaaggaagattctgaggccacgctggattgatgcaagggtgtactcagaccatcaggcgctgaaatcattcaaggacttcgcctcagggaagcgctctcaaataggttttatcgaggtccttggaaagatgcctgaacatttcatggggaagacatgggaagcactcgacaccatgtatgttgtagccactgcagagaaaggaggaagagctcacagaatggctttggaggagctaccagacgccctccaaacaatagctctgatcgctctgttgagtgtgatgaccatgggagtgttttttcttctcatgcagaggaagggcatcggaaagataggcctgggaggcgttgtcctgggagccgcaacctttttctgttggatggctgaagtaccaggaacgaagattgccggaatgctgctgctttccctccttctgatgatcgtgttgattcctgagccagagaagcaacgctcgcagacagacaaccagctagctgtgttcctgatttgcgtgttgacccttgtgggtgcggtggcagccaatgagatgggttggctggacaagaccaagagtgacataagcggtctgtttgggcaaagaattgaaaccaaggagaattttagcattggggagttccttttggacctgaggccggcaacggcttggtcactgtatgctgtgactacagcagttctcactcccttgctaaagcacttgatcacgtcagactacatcaacacctcattgacctcaataaatgttcaagctagtgcgctattcacgctcgcgcgaggcttcccttttgtcgatgttggagtatcggctctcctgctagcagccggatgctggggacaagtcactctcaccgtgacggtgacatcagcaacacttctgttctgccattatgcctacatggtacctggatggcaggctgaggcaatgcgctcagcccagcgacgaacagccgctggaatcatgaaaaacgctgtggtagacggcatcgtggccacggacgttccagagctagagcgtaccacacccatcatgcagaagaaggttggacaagttatgctgattttggtgtctcttgccgcattggtggtaaacccgtctgtgaagacagtgcgggaagccggaattctgattacggcagcagctgttaccctctgggagaacggagcaagctctgtgtggaacgcaacaaccgccataggactttgtcacatcatgcgcggaggctggttatcgtgtttatccataacatggactcttgtaaaaaacatggaaaaaccagggctgaagagaggtggggcaaaaggacgcaccttgggggaggtttggaaagaaagacttaaccagatgacgaaagaagaattcatcaggtaccgtaaagaagccatcactgaagttgaccgctcagcagcaaaacacgctaggaaggaaaggaatatcactggagggcatccagtttctagaggcacggcaaagctaagatggctggtcgagaggaggtttcttgaaccggtcggaaaagtgatcgaccttggatgtggaagaggcggctggtgttattacatggccacacaaaaaagagtccaagaagtcagagggtacacaaaaggtggtcccggacatgaagagccccagctagtgcagagctatggatggaacattgtcaccatgaagagtggggtggatgtgttctataggccttctgaatgttgtgacactctcctttgtgatatcggagagtcctcatcaagtgctgaagttgaagaacatagaacgctacgagtccttgaaatggtggaagactggttgcatcgagggccaaaggaattttgtgtgaaggtactgtgcccctacatgccaaaggtcatagaaaagatggagctgctccaacgccggtatggcgggggattggttaggaacccactctcacggaattccacacatgaaatgtattgggtgagtcgagcctcaggcaatgtggtgcactcagtgaacatgaccagccaggtactcttaggaaggatggagaagaagacctggaagggacctcagtacgaagaagacgtgaacttgggaagcggaacgagagcagtgggaaaacctctactcaactcagacaccagcaagataaagaacaggattgaacgacttaggcgtgagtacagctcgacatggcatcatgatgagaaccacccatatagaacctggaactaccacggtagctacgaagtgaagccaacaggctctgcaagctcactggtcaatggagtggtcaggctcctctcgaaaccatgggacaccatcacaaatgtcaccacaatggccatgacggacaccaccccttttggacaacagcgagtgttcaaagagaaggtggacacgaaagctccggaaccgccagaaggagtgaagtatgtgctcaatgaaaccaccaactggttgtgggcgttcctggcacgagaaaagcgtcccagaatgtgctcgcgagaggaatttataaggaaggtcaatagtaatgcagctctgggcgccatgtttgaggagcagaatcaatggaggagtgctagagaagcggttgaagatccaaaattctgggaaatggtggatgaagagcgtgaggcgcacttacgcggagaatgtcatacttgcatttacaacatgatgggaaagagggagaaaaaacccggagagtttgggaaagccaagggaagcagggccatctggtttatgtggctgggagctcgcttcctagagtttgaggctctgggctttcttaatgaggaccactggcttggaagaaagaactcggggggcggggtcgagggtctgggcctccagaaattaggctacatcctgcgtgaagttggcacccgacccggaggcagaatctacgctgatgacacagccggttgggacacccgcatcacaagagctgacctggagaatgaagccaaggttcttgagttgttggacggggagcaccggcgcctggccagggccatcattgagctcacctatcgccacaaagtagtgaaggtaatgcgcccggctgctgatggaagaaccgtcatggacgtcatctccagggaagaccagagaggaagtgggcaagttgtcacctacgctctaaacacctttaccaacctggctgtccaattggtgagaatgatggaaggagagggtgtgatcggcccagatgatgtggagaaactcacaaaggggaaagggcccaaggttagaacctggctgtctgagaatggggaggaaagactcagccgcatggctgtcagtggagatgactgtgtggtaaagcccttggatgatcgctttgccacctctctccactttctcaacgccatgtcaaaggtgcgcaaggacatccaagagtggaaaccatcaaccggatggtatgattggcagcaagttccattctgttcaaaccacttcactgaactgatcatgaaagatggaagaacactggtgactccatgccgagggcaggatgagttagtgggcagagctcgcatctccccaggggctggatggaatgttcgagacactgcttgcttagccaaatcttatgctcagatgtggttgctcctgtacttccacagaagagatctgcggttgatggccaacgccatctgctctgccgtacctgtaaactgggtccctactggaagaaccacatggtccatccacgctggaggagagtggatgacaacggaagacatgctggaggtctggaatcgtgtctggattgaggaaaatgaatggatggaggacaaaaccccagtggagaagtggagtgatgttccatactctggcaaacgagaggacatttggtgtggcagcctgattggcacaagagcccgggccacgtgggcagaaaacattcaagtggccatcaaccaagtcagatcaataattggagatgagaaatatgtggattacatgagttcattgaagagatatgaagacacaacattggttgaggatacagtattgtaaatactttgttaattgtaaataaatattgttattatgtgtagaagtttagctttataatagtgtttagtgtgtttagagttagaaaaattttagtgaggaagtcaggccggaaaattcccgccaccggaagttgagtagacggtgctgcctgcgactcaaccccaggaggactgggtgaacaaagctgcgaagtgatccatgtaagccctcagaaccgtctcggaaagaggaccccacatgttgtagcttcaaggcccaatgtcagaccacgccatggcgtgccactctgcggagagtgcagtctgcgacagtgccccaggaggactgggtgaacaaaggcgaatcaacgtcccacgcggccctagctctggcaatggtgttaaccagagtgaaaggactagaggttagaggagaccccgcgttctgaagtgcacggcccagcctggctgaagctgtaggtcaggggaaggactagaggttagtggagaccccgtgccgcaaaacaccacaacaacacagcatattgacacctgggatagactaggagatcttctgctctgcacaaccagccacacggcacagtgcgccgacaatggtggctggtggtgcgagaacacaggatct

SEQ ID NO: 46 - DNA, 10808 bp, Zika virus
agttgttgatctgtgtgaatcagactgcgacagttcgagtttgaagcgaaagctagcaacagtatcaacaggttttattttggatttggaaacgagagtttctggtcatgaaaaacccaaaaaagaaatccggaggattccggattgtcaatatgctaaaacgcggagtagcccgtgtgagcccctttgggggcttgaagaggctgccagccggacttctgctgggtcatgggcccatcaggatggtcttggcaattctagcctttttgagattcacggcaatcaagccatcactgggtctcatcaatagatggggttcagtggggaaaaaagaggctatggaaataataaagaagttcaagaaagatctggctgccatgctgagaataatcaatgctaggaaggagaagaagagacgaggcgcagatactagtgtcggaattgttggcctcctgctgaccacagctatggcagcggaggtcactagacgtgggagtgcatactatatgtacttggacagaaacgatgctggggaggccatatcttttccaaccacattggggatgaataagtgttatatacagatcatggatcttggacacatgtgtgatgccaccatgagctatgaatgccctatgctggatgagggggtggaaccagatgacgtcgattgttggtgcaacacgacgtcaacttgggttgtgtacggaacctgccatcacaaaaaaggtgaagcacggagatctagaagagctgtgacgctcccctcccattccactaggaagctgcaaacgcggtcgcaaacctggttggaatcaagagaatacacaaagcacttgattagagtcgaaaattggatattcaggaaccctggcttcgcgttagcagcagctgccatcgcttggcttttgggaagctcaacgagccaaaaagtcatatacttggtcatgatactgctgattgccccggcatacagcatcaggtgcataggagtcagcaatagggactttgtggaaggtatgtcaggtgggacttgggttgatgttgtcttggaacatggaggttgtgtcaccgtaatggcacaggacaaaccgactgtcgacatagagctggttacaacaacagtcagcaacatggcggaggtaagatcctactgctatgaggcatcaatatcagacatggcttcggacagccgctgcccaacacaaggtgaagcctaccttgacaagcaatcagacactcaatatgtctgcaaaagaacgttagtggacagaggctggggaaatggatgtggactttttggcaaagggagcctggtgacatgcgctaagtttgcatgctccaagaaaatgaccgggaagagcatccagccagagaatctggagtaccggataatgctgtcagttcatggctcccagcacagtgggatgatcgttaatgacacaggacatgaaactgatgagaatagagcgaaggttgagataacgcccaattcaccaagagccgaagccaccctggggggttttggaagcctaggacttgattgtgaaccgaggacaggccttgacttttcagatttgtattacttgactatgaataacaagcactggttggtccacaaggagtggttccacgacattccattaccttggcacgctggggcagacaccggaactccacactggaacaacaaagaagcactggtagagttcaaggacgcacatgccaaaaggcaaactgtcgtggttctagggagtcaagaaggagcagttcacacggcccttgctggagctctggaggctgagatggatggtgcaaagggaaggctgtcctctggccacttgaaatgtcgcctgaaaatggataaacttagattgaagggcgtgtcatactccttgtgtaccgcagcgttcacattcaccaagatcccggctgaaacactgcacgggacagtcacagtggaggtacagtacgcagggacagatggaccttgcaaggttccagctcagatggcggtggacatgcaaactctgaccccagttgggaggttgataaccgctaaccccgtaatcactgaaagcactgagaactctaagatgatgctggaacttgatccaccatttggggactcttacattgtcataggagtcggggagaagaagatcacccaccactggcacaggagtggcagcaccattggaaaagcatttgaagccactgtgagaggtgccaagagaatggcagtcttgggagacacagcctgggactttggatcagttggaggcgctctcaactcattgggcaagggcatccatcaaatttttggagcagctttcaaatcattgtttggaggaatgtcctggttctcacaaatcctcattggaacgttgctgatgtggttgggtctgaacacaaagaatggatctatttcccttatgtgcttggccttagggggagtgttgatcttcttatccacagccgtctctgctgatgtggggtgctcggtggacttctcaaagaaggagacgagatgcggtacaggggtgttcgtctataacgacgttgaagcctggagggacaggtacaagtaccatcctgactccccccgtagattggcagcagcagtcaagcaagcctgggaagatggtatctgcgggatctcctctgtttcaagaatggagaacatcatgtggagatcagtagaaggggagctcaacgcaatcttggaagagaatggagttcaactgacggtcgttgtgggatctgtaaaaaaccccatgtggagaggtccacagagattgcccgtgcctgtgaacgagctgccccacggctggaaggcttgggggaaatcgtacttcgtcagagcagcaaagacaaataacagctttgtcgtggatggtgacacactgaaggaatgcccactcgaacatagagcatggaacagctttcttgtggaggatcatgggttcggggtatttcacactagtgtctggctcaaggttagagaagattattcattagagtgtgatccagccgttattggaacagctgttaaggggaaggaggctgtacacagtgatctaggctactggattgagagtgagaagaatgacacatggaggctgaagagggcccatctaatcgagatgaaaacatgtgaatggccaaagtcccacacattgtgggcagatggaatagaagagagtgatctgatcattcccaagtctttagctgggccactcagccatcacaataccagagagggctacaggacccaaatgaaagggccatggcacagtgaagagcttgaaattcggtttgaggaatgcccgggcactaaggtccacgtggaggaaacatgtggaacaagaggaccatctctgagatcaaccactgcaagcggaagggtgatcgaggaatggtgctgcagggagtgcacaatgcccccactgtcgttccgggctaaagatggctgttggtatggaatggagataaggcccaggaaagaaccagaaagcaacttagtaaggtcagtggtgactgcaggatcaactgatcacatggatcacttctcccttggagtgcttgtgattctgctcatggtgcaggaagggctgaagaagagaatgaccacaaagatcatcataagcacatcaatggcagtgctggtagctatgatcctgggaggattttcaatgagtgacctggctaagcttgcaattttgatgggcgccaccttcgcggaaatgaacactggaggagatgtagctcatctggcgctgatagcggcattcaaagtcagaccagcgttgctggtatctttcatcttcagagctaattggacaccccgtgaaagcatgctgctggccttggcctcgtgtcttttgcaaactgcgatctccgccttggaaggcgacctgatggttctcatcaatggttttgctttggcctggttggcaatacgagcgatggttgttccacgcactgataacatcaccttggcaatcctggctgctctgacaccactggcccggggcacactgcttgtggcgtggagagcaggccttgctacttgcggggggtttatgctcctctctctgaagggaaaaggcagtgtgaagaagaacttaccatttgtcatggccctgggactaaccgctgtgaggctggtcgaccccatcaacgtggtgggactgctgttgctcacaaggagtgggaagcggagctggccccctagcgaagtactcacagctgttggcctgatatgcgcattggctggagggttcgccaaggcagatatagagatggctgggcccatggccgcggtcggtctgctaattgtcagttacgtggtctcaggaaagagtgtggacatgtacattgaaagagcaggtgacatcacatgggaaaaagatgcggaagtcactggaaacagtccccggctcgatgtggcgctagatgagagtggtgatttctccctggtggaggatgacggtccccccatgagagagatcatactcaaggtggtcctgatgaccatctgtggcatgaacccaatagccataccctttgcagctggagcgtggtacgtatacgtgaagactggaaaaaggagtggtgctctatgggatgtgcctgctcccaaggaagtaaaaaagggggagaccacagatggagtgtacagagtaatgactcgtagactgctaggttcaacacaagttggagtgggagttatgcaagagggggtctttcacactatgtggcacgtcacaaaaggatccgcgctgagaagcggtgaagggagacttgatccatactggggagatgtcaagcaggatctggtgtcatactgtggtccatggaagctagatgccgcctgggacgggcacagcgaggtgcagctcttggccgtgccccccggagagagagcgaggaacatccagactctgcccggaatatttaagacaaaggatggggacattggagcggttgcgctggattacccagcaggaacttcaggatctccaatcctagacaagtgtgggagagtgataggactttatggcaatggggtcgtgatcaaaaatgggagttatgttagtgccatcacccaagggaggagggaggaagagactcctgttgagtgcttcgagccttcgatgctgaagaagaagcagctaactgtcttagacttgcatcctggagctgggaaaaccaggagagttcttcctgaaatagtccgtgaagccataaaaacaagactccgtactgtgatcttagctccaaccagggttgtcgctgctgaaatggaggaagcccttagagggcttccagtgcgttatatgacaacagcagtcaatgtcacccactctggaacagaaatcgtcgacttaatgtgccatgccaccttcacttcacgtctactacagccaatcagagtccccaactataatctgtatattatggatgaggcccacttcacagatccctcaagtatagcagcaagaggatacatttcaacaagggttgagatgggcgaggcggctgccatcttcatgaccgccacgccaccaggaacccgtgacgcatttccggactccaactcaccaattatggacaccgaagtggaagtcccagagagagcctggagctcaggctttgattgggtgacggatcattctggaaaaacagtttggtttgttccaagcgtgaggaacggcaatgagatcgcagcttgtctgacaaaggctggaaaacgggtcatacagctcagcagaaagacttttgagacagagttccagaaaacaaaacatcaagagtgggactttgtcgtgacaactgacatttcagagatgggcgccaactttaaagctgaccgtgtcatagattccaggagatgcctaaagccggtcatacttgatggcgagagagtcattttggctggacccatgcctgtcacacatgccagcgctgcccagaggagggggcgcataggcaggaatcccaacaaacctggagatgagtatctgtatggaggtgggtgcgcagagactgacgaagaccatgcacactggcttgaagcaagaatgctccttgacaatatttacctccaagatggcctcatagcctcgctctatcgacctgaggccgacaaagtagcagccattgagggagagttcaagcttaggacggagcaaaggaagacctttgtggaactcatgaaaagaggagatcttcctgtttggctggcctatcaggttgcatctgccggaataacctacacagatagaagatggtgctttgatggcacgaccaacaacaccataatggaagacagtgtgccggcagaggtgtggaccagacacggagagaaaagagtgctcaaaccgaggtggatggacgccagagtttgttcagatcatgcggccctgaagtcattcaaggagtttgccgctgggaaaagaggagcggcttttggagtgatggaagccctgggaacactgccaggacacatgacagagagattccaggaagccattgacaacctcgctgtgctcatgcgggcagagactggaagcaggccttacaaagccgcggcggcccaattgccggagaccctagagaccattatgcttttggggttgctgggaacagtctcgctgggaatctttttcgtcttgatgaggaacaagggcatagggaagatgggctttggaatggtgactcttggggccagcgcatggctcatgtggctctcggaaattgagccagccagaattgcatgtgtcctcattgttgtgttcctattgctggtggtgctcatacctgagccagaaaagcaaagatctccccaggacaaccaaatggcaatcatcatcatggtagcagtaggtcttctgggcttgattaccgccaatgaactcggatggttggagagaacaaagagtgacctaagccatctaatgggaaggagagaggagggagcaaccataggattctcaatggacattgacctgcggccagcctcagcttgggccatctatgctgccttgacaactttcattaccccagccgtccaacatgcagtgaccacttcatacaacaactactccttaatggcgatggccacgcaagctggagtgttgtttggtatgggcaaagggatgccattctacgcatgggactttggagtcccgctgctaatgataggttgctactcacaattaacacccctgaccctaatagtggccatcattttgctcgtggcgcactacatgtacttgatcccagggctgcaggcagcagctgcgcgtgctgcccagaagagaacggcagctggcatcatgaagaaccctgttgtggatggaatagtggtgactgacattgacacaatgacaattgacccccaagtggagaaaaagatgggacaggtgctactcatagcagtagcagtctccagcgccatactgtcgcggaccgcctgggggtggggggaggctggggccctgatcacagccgcaacttccactttgtgggaaggctctccgaacaagtactggaactcctctacagccacttcactgtgtaacatttttaggggaagttacttggctggagcttctctaatctacatagtaacaagaaacgctggcttggtcaagagacgtgggggtggaacaggagagaccctgggagagaaatggaaggcccgcttgaaccagatgtcggccctggagttctactcctacaaaaagtcaggcatcaccgaggtgtgcagagaagaggcccgccgcgccctcaaggatggtgtggcaacgggaggccatgctgtgtcccgaggaagtgcaaagctgagatggttggtggagcggggatacctgcagccctatggaaaggtcattgatcttggatgtggcagagggggctggagttactacgccgccaccatccgcaaagttcaagaagtgaaaggatacacaaaaggaggccctggtcatgaagaacccgtgttggtgcaaagctatgggtggaacatagtccgtcttaagagtggggtggacgtctttcatatggcggctgagccgtgtgacacgttgctgtgtgacataggtgagtcatcatctagtcctgaagtggaagaagcacggacgctcagagtcctctccatggtgggggattggcttgaaaaaagaccaggagccttttgtataaaagtgttgtgcccatacaccagcactatgatggaaaccctggagcgactgcagcgtaggtatgggggaggactggtcagagtgccactctcccgcaactctacacatgagatgtactgggtctctggagcgaaaagcaacaccataaaaagtgtgtccaccacgagccagctcctcttggggcgcatggacgggcctaggaggccagtgaaatatgaggaggatgtgaatctcggctctggcacgcgggctgtggtaagctgcgctgaagctcccaacatgaagatcattggtaaccgcattgaaaggatccgcagtgagcacgcggaaacgtggttctttgacgagaaccacccatataggacatgggcttaccatggaagctatgaggcccccacacaagggtcagcgtcctctctaataaacggggttgtcaggctcctgtcaaaaccctgggatgtggtgactggagtcacaggaatagccatgaccgacaccacaccgtatggtcagcaaagagttttcaaggaaaaagtggacactagggtgccagacccccaagaaggcactcgtcaggttatgagcatggtctcttcctggttgtggaaagagctaggcaaacacaaacggccacgagtctgtaccaaagaagagttcatcaacaaggttcgtagcaatgcagcattaggggcaatatttgaagaggaaaaagagtggaagactgcagtggaagctgtgaacgatccaaggttctgggctctagtggacaaggaaagagagcaccacctgagaggagagtgccagagttgtgtgtacaacatgatgggaaaaagagaaaagaaacaaggggaatttggaaaggccaagggcagccgcgccatctggtatatgtggctaggggctagatttctagagttcgaagcccttggattcttgaacgaggatcactggatggggagagagaactcaggaggtggtgttgaagggctgggattacaaagactcggatatgtcctagaagagatgagtcgcataccaggaggaaggatgtatgcagatgacactgctggctgggacacccgcatcagcaggttcgatctggagaatgaagctctaatcaccaaccaaatggagaaagggcatagggccttggcattggccataatcaagtacacataccaaaacaaagtggtaaaggtccttagaccagctgaaaaagggaaaacagttatggacattatttcgagacaagaccaaagggggagcggacaagttgtcacttacgctcttaacacatttaccaacctagtggtgcaactcattcggaatatggaggctgaggaagttctagagatgcaagacttgtggctgctgcggaggtcagagaaagtgaccaactggttgcagagcaacggatgggataggctcaaacgaatggcagtcagtggagatgattgcgttgtgaagccaattgatgataggtttgcacatgccctcaggttcttgaatgatatgggaaaagttaggaaggacacacaagagtggaaaccctcaactggatgggacaactgggaagaagttccgttttgctcccaccacttcaacaagctccatctcaaggacgggaggtccattgtggttccctgccgccaccaagatgaactgattggccgggcccgcgtctctccaggggcgggatggagcatccgggagactgcttgcctagcaaaatcatatgcgcaaatgtggcagctcctttatttccacagaagggacctccgactgatggccaatgccatttgttcatctgtgccagttgactgggttccaactgggagaactacctggtcaatccatggaaagggagaatggatgaccactgaagacatgcttgtggtgtggaacagagtgtggattgaggagaacgaccacatggaagacaagaccccagttacgaaatggacagacattccctatttgggaaaaagggaagacttgtggtgtggatctctcatagggcacagaccgcgcaccacctgggctgagaacattaaaaacacagtcaacatggtgcgcaggatcataggtgatgaagaaaagtacatggactacctatccacccaagttcgctacttgggtgaagaagggtctacacctggagtgctgtaagcaccaatcttaatgttgtcaggcctgctagtcagccacagcttggggaaagctgtgcagcctgtgacccccccaggagaagctgggaaaccaagcctatagtcaggccgagaacgccatggcacggaagaagccatgctgcctgtgagcccctcagaggacactgagtcaaaaaaccccatgcgcttggaggcgcaggatgggaaaagaaggtggcgaccttccccacccttcaatctggggcctgaactggagatcagctgtggatctccagaagagggactagtggttagaggagaccccccggaaaacgcaaaacagcatattgacgctgggaaagaccagagactccatgagtttccaccacgctggccgccaggcacagatcgccgaatagcggcggccggtgtggggaaatccatgggtctt

SEQ ID NO: 47 - DNA, 10712 bp, Dengue virus type 2
agttgttagtctacgtggaccgacaaagacagattctttgagggagctaagctcaacgtagttctaactgttttttgattagagagcagatctctgatgaataaccaacggaaaaaggcgagaaacacgcctttcaatatgctgaaacgcgagagaaaccgcgtgtcaactgtacaacagttgacaaagagattctcacttggaatgctgcagggacgaggaccactaaaattgttcatggccctggtggcattccttcgtttcctaacaatcccaccaacagcagggatattaaaaagatggggaacaattaaaaaatcaaaggctattaatgttctgagaggcttcaggaaagagattggaaggatgctgaatatcttaaacaggagacgtagaactgcaggcatgatcatcatgctgattccaacagtgatggcgtttcatctgaccacacgcaacggagaaccacacatgatcgtcagtagacaagaaaaagggaaaagccttctgtttaagacaaaggacggcacgaacatgtgtaccctcatggccatggaccttggtgagttgtgtgaagacacaatcacgtataaatgtccttttctcaagcagaacgaaccagaagacatagattgttggtgcaactccacgtccacatgggtaacttatgggacatgtaccaccacaggagagcacagaagagaaaaaagatcagtggcgcttgttccacacgtgggaatgggattggagacacgaactgaaacatggatgtcatcagaaggggcctggaaacatgcccagagaattgaaacttggattctgagacatccaggctttaccataatggccgcaatcctggcatacaccataggaacgacgcatttccaaagagtcctgatattcatcctactgacagccatcgctccttcaatgacaatgcgctgcataggaatatcaaatagggactttgtggaaggagtgtcaggagggagttgggttgacatagttttagaacatggaagttgtgtgacgacgatggcaaaaaataaaccaacactggactttgaactgataaaaacagaagccaaacaacccgccaccttaaggaagtactgtatagaggctaaactgaccaacacgacaacagactcgcgctgcccaacacaaggggaacccaccctgaatgaagagcaggacaaaaggtttgtctgcaaacattccatggtagacagaggatggggaaatggatgtggattatttggaaaaggaggcatcgtgacctgtgctatgttcacatgcaaaaagaacatggaaggaaaaattgtgcagccagaaaacctggaatacactgtcgtgataacacctcattcaggggaagaacatgcagtcggaaatgacacaggaaaacatggtaaagaagtcaagataacaccacagagctccatcacagaggcggaactgacaggctatggcactgttacgatggagtgctctccaagaacgggcctcgacttcaatgagatggtgttgctgcaaatgaaagacaaagcttggctggtgcacagacaatggttcctagacctaccgttgccatggctgcccggagcagacacacaaggatcaaattggatacagaaagagacactggtcaccttcaaaaatccccatgcgaaaaaacaggatgttgttgtcttaggatcccaagagggggccatgcatacagcactcacaggggctacggaaatccagatgtcatcaggaaacctgctgttcacaggacatctcaagtgcaggctgagaatggacaaattacaacttaaagggatgtcatactccatgtgcacaggaaagtttaaaattgtgaaggaaatagcagaaacacaacatggaacaatagtcattagagtacaatatgaaggagacggctctccatgcaagatcccctttgagataatggatctggaaaaaagacatgttttgggccgcctgatcacagtcaacccaattgtaacagaaaaggacagtccagtcaacatagaagcagaacctccattcggagacagctacatcatcataggagtggaaccaggacaattgaagctggactggttcaagaaaggaagttccatcggccaaatgtttgagacaacaatgaggggagcgaaaagaatggccattttgggcgacacagcctgggattttggatctctgggaggagtgttcacatcaataggaaaggctctccaccaggtttttggagcaatctacggggctgctttcagtggggtctcatggactatgaagatcctcataggagttatcatcacatggataggaatgaactcacgtagcacatcactgtctgtgtcactggtattagtgggaatcgtgacactgtacttgggagttatggtgcaggccgatagtggttgcgttgtgagctggaagaacaaagaactaaaatgtggcagtggaatattcgtcacagataacgtgcatacatggacagaacaatacaagttccaaccagaatccccttcaaaactggcttcagccatccagaaagctcatgaagagggcatctgtggaatccgctcagtaacaagactggaaaatcttatgtggaaacagataacatcagaattgaatcatattctatcagaaaatgaagtgaaactgaccatcatgacaggagacatcaaaggaatcatgcaggtaggaaaacgatctctgcggcctcaacccactgagttgaggtattcatggaaaacatggggtaaagcgaaaacgctctccacagaactccacaatcagaccttcctcattgatggtcccgaaacagcagaatgccccaacacaaacagagcttggaattcactagaagttgaggactacggctttggagtattcactaccaatatatggctaagattgagagaaaagcaggatgtattttgtgactcaaaactcatgtcagcggccataaaggacaacagagccgtccatgctgatatgggttattggatagaaagcgcactcaatgatacatggaagatagagaaagcttctttcattgaagtcaaaagttgccactggccaaagtcacacactctatggagtaatggagtgctagaaagcgagatggtaattccaaagaatttcgctggaccagtgtcacaacataataacagaccaggctatcacacacaaacagcaggaccttggcatctaggcaagcttgagatggactttgatttctgcgaagggactacagtggtggtaaccgaggactgtggaaacagagggccttctttaagaacaaccactgcctcaggaaaactcataacggaatggtgttgtcgatcttgcacactaccaccactaagatacagaggtgaggatggatgctggtacgggatggaaatcagaccattgaaagagaaagaagaaaatctggtcagttctctggtcacagccggacatgggcagattgataatttctcattaggaatcttgggaatggcactgttccttgaagaaatgctcaggactcgagtaggaacgaaacatgcaatattactagtcgcagtttctttcgtaacgttaatcacagggaacatgtcttttagagacctgggaagagtgatggttatggtgggtgccaccatgacagatgacataggcatgggtgtgacttatcttgctctactagcagctttcaaagtcagaccaacctttacagctggactgctcttgagaaaactgacctccaaggaattaatgatgaccaccataggaatcgttcttctctcccagagtagcataccagagaccattcttgaactgaccgatgcgttagctttaggcatgatggtcctcaagatggtgagaaacatggaaaaatatcagctggcagtgactatcatggctattttgtgcgtcccaaatgctgtgatattacagaacgcatggaaagtgagttgcacaatattggcagtggtgtctgtttcccccctgctcttaacatcctcacaacagaaagcggactggataccattagcgttgacgatcaaaggcctcaatccaacagccatttttctaacaaccctctcaagaaccagcaagaaaaggagctggcctttaaatgaggccatcatggcggttgggatggtgagtatcttggccagctctctcttaaagaatgacatccccatgacaggaccattagtggctggagggcttcttactgtgtgctacgtactaactgggcggtcagccgatctggaactagagagagctaccgatgtcaaatgggatgaccaggcagagatatcaggtagcagtccaattctgtcaataacaatatcagaagatggcagcatgtcaataaagaatgaagaggaagagcaaacactgactatactcattagaacaggattgcttgtgatctcaggactctttccggtatcaataccaatcacagcagcagcatggtacctgtgggaagtaaagaaacaacgggctggagtgttgtgggatgtcccctcaccaccacccgtgggaaaggctgaattggaagatggagcctacagaatcaagcaaaaaggaatccttggatattcccagatcggagctggagtttacaaagaaggaacatttcacacaatgtggcacgtcacacgtggcgctgtcctaatgcataaggggaagaggattgaaccatcatgggcggacgtcaagaaagacttaatatcatatggaggaggttggaagctagaaggagaatggaaagaaggagaagaagtccaggtcttggcattggagcctgggaaaaatccaagagccgtccaaacaaaacctggcctttttagaaccaatactggaaccataggtgccgtatctctggacttttcccctgggacgtcaggatctccaatcgtcgacaaaaaaggaaaagttgtaggtctctatggcaatggtgtcgttacaaggagtggagcatatgtgagtgccatagctcagactgaaaaaagcattgaagacaatccagagattgaagatgacatctttcgaaagagaagattgaccatcatggatctccacccaggagcaggaaagacaaagagatacctcccggccatagtcagagaggccataaaaagaggcttgagaacactaatcctagcccccactagagtcgtggcagctgaaatggaggaagcccttagaggacttccaataagataccaaactccagctatcagggctgagcacaccgggcgggagattgtggacttaatgtgtcatgccacatttaccatgaggctgctatcaccaatcagggtgccaaattacaacctgatcatcatggacgaagcccattttacagatccagcaagcatagcagctaggggatacatctcaactcgagtggagatgggtgaggcagctggaatttttatgacagccactcctccgggtagcagagatccatttcctcagagtaatgcaccaattatggacgaagaaagagaaattccggaacgttcatggaactccgggcacgagtgggtcacggattttaaaggaaagactgtctggtttgttccaagcataaaaaccggaaatgacatagcagcctgcctgagaaagaatggaaagagggtgatacaactcagtaggaagacctttgattctgaatatgtcaagactagaaccaatgactgggatttcgtggttacaactgacatctcggaaatgggtgccaactttaaagctgagagggttatagaccccagacgctgcatgaaaccagttatactgacagacggcgaagagcgggtgattctggcaggacccatgccagtgacccactctagtgcagcacaaagaagagggagaataggaaggaatccaaggaatgaaaatgatcaatatatatatatgggggaacccctggaaaatgatgaagactgtgcgcactggaaggaagctaagatgctcctagataacatcaacacacctgaaggaatcattcccagcatgttcgagccagagcgtgaaaaggtggatgccattgacggtgaatatcgcttgagaggagaagcacggaaaacttttgtggacctaatgagaagaggagacctaccagtctggttggcttataaagtggcagctgaaggtatcaactacgcagacagaagatggtgttttgacggaaccagaaacaatcaaatcttggaagaaaatgtggaagtggaaatctggacaaaggaaggggaaaggaaaaaattgaaacctagatggttagatgctaggatctactccgacccactggcgctaaaagaattcaaggaattcgcagccggaagaaagtccctaaccctgaacctaatcacagagatgggcagactcccaacttttatgactcagaaggccagagatgcactagacaacttggcggtgctgcacacggctgaagcgggtggaaaggcatacaatcatgctctcagtgaactaccggagaccctggagacattgcttttgctgacactgttggccacagtcacgggaggaatctttctattcctgatgagcggaaggggtatagggaagatgaccctgggaatgtgctgcataatcacggccagcatcctcttatggtatgcacaaatacaaccacattggatagcagcttcaataatattggagttctttctcatagtcttgctcattccagaaccagaaaagcagaggacaccccaggataatcaattgacttatgtcatcatagccatcctcacagtggtggccgcaaccatggcaaacgaaatgggttttctggaaaaaacaaagaaagacctcggactgggaaacattgcaactcagcaacctgagagcaacattctggacatagatctacgtcctgcatcagcatggacgttgtatgccgtggctacaacatttatcacaccaatgttgagacatagcattgaaaattcctcagtaaatgtgtccctaacagccatagctaaccaagccacagtgctaatgggtctcgggaaaggatggccattgtcaaagatggacattggagttcccctccttgctattgggtgttactcacaagtcaaccctataaccctcacagcggctcttcttttattggtagcacattatgccatcataggaccgggacttcaagccaaagcaaccagagaagctcagaaaagagcagcagcgggcatcatgaaaaacccaactgtggatggaataacagtgatagatctagatccaataccctatgatccaaagtttgaaaagcagttgggacaagtaatgctcctagtcctttgcgtgacccaagtgctgatgatgaggactacgtgggctttgtgtgaagccttaactctagcaaccggacccgtgtccacattgtgggaaggaaatccagggagattctggaacacaaccattgcagtgtcaatggcaaacatctttagagggagttacctggctggagctggacttctcttttctatcatgaagaacacaaccagcacgagaagaggaactggcaacataggagaaacgctaggagagaaatggaaaagcagactgaacgcattggggaaaagtgaattccagatctacaaaaaaagtggaattcaagaagtggacagaaccttagcaaaagaaggcattaaaagaggagaaacggatcatcacgctgtgtcgcgaggctcagcaaaactgagatggttcgttgaaagaaatttggtcacaccagaagggaaagtagtggaccttggttgcggtagagggggctggtcatactattgtggaggattaaagaatgtaagagaagttaaaggcttaacaaaaggaggaccaggacacgaagaacctatccctatgtcaacatatgggtggaatctagtacgcttacagagcggagttgacgtcttttttgttccaccagagaagtgtgacacattgttgtgtgacataggggaatcatcaccaaatcccacggtagaagcgggacgaacactcagagtccttaacctagtggaaaattggctgaacaataacacccaattttgcgtaaaggttcttaacccgtacatgccctcagtcattgaaagaatggaaaccttacaacggaaatacggaggagccttggtgagaaatccactctcacggaattccacacatgagatgtactgggtgtccaatgcttccgggaacatagtgtcatcagtgaacatgatttcaagaatgctgattaacagattcaccatgagacacaagaaggccacctatgagccagatgtcgacctcggaagcggaacccgcaatattggaattgaaagtgagacaccgaacctagacataattgggaaaagaatagaaaaaataaaacaagagcatgaaacgtcatggcactatgaccaagaccacccatacaaaacatgggcttaccatggcagctatgaaacaaaacagactggatcagcatcatccatggtgaacggagtagtcagattgctgacaaaaccctgggacgttgttccaatggtgacacagatggcaatgacagacacaactcctttcggacaacagcgcgtcttcaaagagaaggtggatacgagaacccaagaaccaaaagaaggcacaaaaaaactaatgaaaatcacggcagagtggctctggaaagaactaggaaagaaaaagacacctagaatgtgcaccagagaagaattcacaaaaaaggtgagaagcaatgcagccttgggggccatatttaccgatgagaacaagtggaaatcggcgcgtgaggctgttgaagatagtaggttttgggagctggttgacaaggaaagaaacctccatcttgaagggaaatgtgaaacatgtgtatacaacatgatgggaaaaagagagaaaaaactaggagagtttggtaaagcaaaaggcagcagagccatatggtacatgtggctcggagcacgcttcttagagtttgaagccctaggatttttgaatgaagaccattggttctccagagagaactccctgagtggagtggaaggagaagggctgcataagctaggttacatcttaagagaggtgagcaagaaagaaggaggagcaatgtatgccgatgacaccgcaggctgggacacaagaatcacaatagaggatttaaaaaatgaagaaatgataacgaaccacatggcaggagaacacaagaaacttgccgaggccatttttaaattgacgtaccaaaacaaggtggtgcgtgtgcaaagaccaacaccaagaggcacagtaatggacatcatatcgagaagagaccaaaggggtagtggacaagttggcacctatggcctcaacactttcaccaacatggaagcacaactaattaggcaaatggagggggaaggaatcttcaaaaacatccagcacttgacagcctcagaagaaatcgctgtgcaagattggctagtaagagtagggcgtgaaaggttgtcaagaatggccatcagtggagatgattgtgttgtgaaacctttagatgatagatttgcaagagctctaacagctctaaatgacatgggaaaggttaggaaggacatacagcaatgggagccctcaagaggatggaacgactggacacaggtgcccttctgttcacaccattttcacgagttaattatgaaagatggtcgcacactcgtagttccatgcagaaaccaagatgaattgatcggcagagcccgaatttcccagggagctgggtggtctttacgggagacggcctgtttggggaagtcttacgcccaaatgtggagcttgatgtacttccacagacgtgatctcaggctagcggcaaatgccatctgctcggcagtcccgtcacactgggttccaacaagccggacaacctggtccatacacgccagccatgaatggatgacgacggaagacatgttgacagtttggaacaaagtatggatcctagaaaatccatggatggaagacaaaactccagtggaatcatgggaggaaatcccatacctgggaaaaagagaagaccaatggtgcggctcactgattgggctgacaagcagagccacctgggcgaagaatatccagacagcaataaaccaagtcagatccctcattggcaatgaggaatacacagattacatgccatccatgaaaagattcagaagagaagaggaagaggcaggagttttgtggtagaaaaacatgaaacaaaacagaagtcaggtcggattaagccatagtacgggaaaaactatgctacctgtgagccccgtccaaggacgttaaaagaagtcaggccactttgatgccatagcttgagcaactgtgcagcctgtagctccacctgagaaggtgtaaaaaatccgggaggccacaaaccatggaagctgtacgcatggcgtagtggactagcggttagaggagacccctcccttacagatcgcagcaacaatgggggcccaaggtgagatgaagctgtagtctcactggaaggactagaggttagaggagacccccccaaaacaaaaaacagcatattgacgctgggaaagaccagagatcctgctgtctcctcagcatcattccaggcacaggacgccagaaaatggaatggtgctgttgaatcaacaggttct

SEQ ID NO: 48 - DNA, 18 bp, Artificial Sequence
  synthetic
gattcttgtcgtttctcg

SEQ ID NO: 49 - DNA, 23 bp, Artificial Sequence
  synthetic
cacacacggatcacattgacacc

SEQ ID NO: 50 - DNA, 20 bp, Artificial Sequence
  synthetic
gtgctttaatttatatcaag

SEQ ID NO: 51 - DNA, 20 bp, Artificial Sequence
  synthetic
cttgatataaattaaagcac

SEQ ID NO: 52 - DNA, 56 bp, Artificial Sequence
  synthetic
ggttggtttaatggagtgctttaatttatatcaagcagccaatttcggagtgttcc

SEQ ID NO: 53 - DNA, 24 bp, Artificial Sequence
  synthetic
gctcccaccatttccaccatttgc

SEQ ID NO: 54 - DNA, 21 bp, Artificial Sequence
  synthetic
ctcaccacctcctcttttggg

SEQ ID NO: 55 - DNA, 21 bp, Artificial Sequence
  synthetic
cccaaaagaggaggtggtgag

SEQ ID NO: 56 - DNA, 50 bp, Artificial Sequence
  synthetic
gccaagggtcatggtctcaccacctcctcttttggggttttgcaatatcc

SEQ ID NO: 57 - DNA, 50 bp, Artificial Sequence
  synthetic
ggatattgcaaaaccccaaaagaggaggtggtgagaccatgacccttggc

SEQ ID NO: 58 - DNA, 20 bp, Artificial Sequence
  synthetic
caaaactccactgcgctggc

SEQ ID NO: 59 - DNA, 20 bp, Artificial Sequence
  synthetic
gccagcgcagtggagttttg

SEQ ID NO: 60 - DNA, 41 bp, Artificial Sequence
  synthetic
ggcacgtcccacaaaactccactgcgctggcttttgcctgc

SEQ ID NO: 61 - DNA, 41 bp, Artificial Sequence; identical to SEQ ID NO: 60
  synthetic

SEQ ID NO: 62 - DNA, 41 bp, Artificial Sequence
  synthetic
gcaggcaaaagccagcgcagtggagttttgtgggacgtgcc

SEQ ID NO: 63 - DNA, 20 bp, Artificial Sequence
  synthetic
ggtgacgggatggaaaatgg

SEQ ID NO: 64 - DNA, 22 bp, Artificial Sequence
  synthetic
ggcacttacccatgaagtgacc

SEQ ID NO: 65 - DNA, 31 bp, Artificial Sequence
  synthetic
gagcaaccgtactcagcatgcacgttcacgg

SEQ ID NO: 66 - DNA, 31 bp, Artificial Sequence
  synthetic
ccgtgaacgtgcatgctgagtacggttgctc

SEQ ID NO: 67 - DNA, 17 bp, Artificial Sequence
  synthetic
gcatggaccaactaccg

SEQ ID NO: 68 - DNA, 29 bp, Artificial Sequence
  synthetic
ggaaatctctgttgctcattccaagacag

SEQ ID NO: 69 - DNA, 29 bp, Artificial Sequence
  synthetic
ctgtcttggaatgagcaacagagatttcc

SEQ ID NO: 70 - DNA, 30 bp, Artificial Sequence
  synthetic
gcaacaacatgggccgtcactctctccaac

SEQ ID NO: 71 - DNA, 24 bp, Artificial Sequence
  synthetic
gcacactagtttgtgacataaggc

SEQ ID NO: 72 - DNA, 20 bp, Artificial Sequence
  synthetic
cgcttgttttggcacactag

SEQ ID NO: 73 - DNA, 16 bp, Artificial Sequence
  synthetic
gcgtacggattttacg

SEQ ID NO: 74 - DNA, 16 bp, Artificial Sequence
  synthetic
cgtaaaatccgtacgc

SEQ ID NO: 75 - DNA, 27 bp, Artificial Sequence
  synthetic
gtacggattttacggtttaccagatcg

SEQ ID NO: 76 - DNA, 27 bp, Artificial Sequence
  synthetic
cgatctggtaaaccgtaaaatccgtac

SEQ ID NO: 77 - DNA, 20 bp, Artificial Sequence
  synthetic
tggatggccttccccattat

SEQ ID NO: 78 - DNA, 25 bp, Artificial Sequence
  synthetic
cattataagctgcaataaacaagtt

SEQ ID NO: 79 - DNA, 19 bp, Artificial Sequence
  synthetic
gggtcggcatggcatctcc

SEQ ID NO: 80 - DNA, 30 bp, Artificial Sequence
  synthetic
tgccatgccgacccagatacttgatgtttc

SEQ ID NO: 81 - DNA, 30 bp, Artificial Sequence; identical to SEQ ID NO: 80
  synthetic

SEQ ID NO: 82 - DNA, 30 bp, Artificial Sequence
  synthetic
ggcaatgtgatctaaggatctacgaacgag

SEQ ID NO: 83 - DNA, 30 bp, Artificial Sequence
  synthetic
ctcgttcgtagatccttagatcacattgcc

SEQ ID NO: 84 - DNA, 30 bp, Artificial Sequence
  synthetic
ggagttcctaggaggggattacaggccacc

SEQ ID NO: 85 - DNA, 30 bp, Artificial Sequence
  synthetic
ggtggcctgtaatcccctcctaggaactcc

SEQ ID NO: 86 - DNA, 30 bp, Artificial Sequence
  synthetic
aaatcaaacaagcgggggactgtgttgtgg

SEQ ID NO: 87 - DNA, 30 bp, Artificial Sequence
  synthetic
ccacaacacagtcccccgcttgtttgattt

SEQ ID NO: 88 - DNA, 30 bp, Artificial Sequence
  synthetic
gtgaccgtgggtgccctatcggaaatagga

SEQ ID NO: 89 - DNA, 30 bp, Artificial Sequence
  synthetic
tcctatttccgatagggcacccacggtcac

SEQ ID NO: 90 - DNA, 30 bp, Artificial Sequence
  synthetic
gctccgtcatatggtaaccaatgcctggat

SEQ ID NO: 91 - DNA, 30 bp, Artificial Sequence
  synthetic
atccaggcattggttaccatatgacggagc

SEQ ID NO: 92 - DNA, 30 bp, Artificial Sequence
  synthetic
aacgatctggtaaacagtatattttgcgtg

SEQ ID NO: 93 - DNA, 30 bp, Artificial Sequence
  synthetic
cacgcaaaatatactgtttaccagatcgtt

SEQ ID NO: 94 - DNA, 20 bp, Artificial Sequence
  synthetic
tggatggccttccccattat

SEQ ID NO: 95 - DNA, 25 bp, Artificial Sequence
  synthetic
cattataagctgcaataaacaagtt

SEQ ID NO: 96 - DNA, 19 bp, Artificial Sequence
  synthetic
gggtcggcatggcatctcc

SEQ ID NO: 97 - DNA, 19 bp, Artificial Sequence
  synthetic
tcctgtgttctcgcaccac

SEQ ID NO: 98 - DNA, 19 bp, Artificial Sequence
  synthetic
gtggtgcgagaacacagga

SEQ ID NO: 99 - DNA, 26 bp, Artificial Sequence
  synthetic
ttacaatactgtatcctcaaccaatg

SEQ ID NO: 100 - DNA, 28 bp, Artificial Sequence
  synthetic
ctgtatcctcaaccaatgttgtgtcttc

SEQ ID NO: 101 - DNA, 28 bp, Artificial Sequence
  synthetic
gaagacacaacattggttgaggatacag

SEQ ID NO: 102 - DNA, 16 bp, Artificial Sequence
  synthetic
ggtggggcaaaaggac

SEQ ID NO: 103 - DNA, 19 bp, Artificial Sequence
  synthetic
cgtccttttgccccacctc

SEQ ID NO: 104 - DNA, 19 bp, Artificial Sequence
  synthetic
gaggtggggcaaaaggacg

SEQ ID NO: 105 - DNA, 20 bp, Artificial Sequence
  synthetic
cccatctcattggctgccac

SEQ ID NO: 106 - DNA, 20 bp, Artificial Sequence
  synthetic
gtggcagccaatgagatggg

SEQ ID NO: 107 - DNA, 20 bp, Artificial Sequence
  synthetic
tagctggttgtctgtctgcg

SEQ ID NO: 108 - DNA, 22 bp, Artificial Sequence
  synthetic
ttgagtgtgatgaccatgggag

SEQ ID NO: 109 - DNA, 28 bp, Artificial Sequence
  synthetic
gacctcgataaaacctatttgagagcgc

SEQ ID NO: 110 - DNA, 28 bp, Artificial Sequence
  synthetic
gcgctctcaaataggttttatcgaggtc

SEQ ID NO: 111 - DNA, 29 bp, Artificial Sequence
  synthetic
ctcctctctttgtgtattggagagttatc

SEQ ID NO: 112 - DNA, 29 bp, Artificial Sequence
  synthetic
gataactctccaatacacaaagagaggag

SEQ ID NO: 113 - DNA, 19 bp, Artificial Sequence
  synthetic
cttcagttgcaggccaccc

SEQ ID NO: 114 - DNA, 19 bp, Artificial Sequence
  synthetic
gggtggcctgcaactgaag

SEQ ID NO: 115 - DNA, 29 bp, Artificial Sequence
  synthetic
gaaaaggatcaatcatgtcagcgttgtag

SEQ ID NO: 116 - DNA, 29 bp, Artificial Sequence
  synthetic
ctacaacgctgacatgattgatccttttc

SEQ ID NO: 117 - DNA, 20 bp, Artificial Sequence
  synthetic
cggtccatccaagcttccac

SEQ ID NO: 118 - DNA, 30 bp, Artificial Sequence
  synthetic
ggcacatccagtatcagcgttaactccaag

SEQ ID NO: 119 - DNA, 30 bp, Artificial Sequence
  synthetic
cttggagttaacgctgatactggatgtgcc

SEQ ID NO: 120 - DNA, 60 bp, Artificial Sequence
  synthetic
ccgacttatatctatggcacatccagtatcagcgttaactccaagtgtcatgaacaacag

SEQ ID NO: 121 - DNA, 60 bp, Artificial Sequence
  synthetic
ctgttgttcatgacacttggagttaacgctgatactggatgtgccatagatataagtcgg

SEQ ID NO: 122 - DNA, 23 bp, Artificial Sequence
  synthetic
gataggtgtgaactcccgcaatg

SEQ ID NO: 123 - DNA, 25 bp, Artificial Sequence
  synthetic
cctgcttacggctctcactgcattg

SEQ ID NO: 124 - DNA, 20 bp, Artificial Sequence
  synthetic
ggcaattggacctgcttacg

SEQ ID NO: 125 - DNA, 25 bp, Artificial Sequence
  synthetic
gcaatcaatgtcgtcaggctcttcc

SEQ ID NO: 126 - DNA, 24 bp, Artificial Sequence
  synthetic
caccagtatccagcatcattgatg

SEQ ID NO: 127 - DNA, 29 bp, Artificial Sequence
  synthetic
cttcctgagagttaatgctcccacgccag

SEQ ID NO: 128 - DNA, 29 bp, Artificial Sequence
  synthetic
ctggcgtgggagcattaactctcaggaag

SEQ ID NO: 129 - DNA, 60 bp, Artificial Sequence
  synthetic
aatagtgttgtcaatcttcctgagagttaatgctcccacgccagcaatcaagccaatcat

SEQ ID NO: 130 - DNA, 60 bp, Artificial Sequence
  synthetic
atgattggcttgattgctggcgtgggagcattaactctcaggaagattgacaacactatt

SEQ ID NO: 131 - DNA, 24 bp, Artificial Sequence
  synthetic
cagaagaagagaggaggaaagacc

SEQ ID NO: 132 - DNA, 21 bp, Artificial Sequence
  synthetic
ggccctcctggtttcttagac

SEQ ID NO: 133 - DNA, 21 bp, Artificial Sequence
  synthetic
gtctaagaaaccaggagggcc

SEQ ID NO: 134 - DNA, 22 bp, Artificial Sequence
  synthetic
cagctcacacaggcgaactact

SEQ ID NO: 135 - DNA, 22 bp, Artificial Sequence
  synthetic
agtagttcgcctgtgtgagctg

SEQ ID NO: 136 - DNA, 20 bp, Artificial Sequence
  synthetic
tggatggccttccccattat

SEQ ID NO: 137 - DNA, 25 bp, Artificial Sequence
  synthetic
cattataagctgcaataaacaagtt

SEQ ID NO: 138 - DNA, 19 bp, Artificial Sequence
  synthetic
gggtcggcatggcatctcc

SEQ ID NO: 139 - DNA, 19 bp, Artificial Sequence
  synthetic
tcctgtgttctcgcaccac

SEQ ID NO: 140 - DNA, 19 bp, Artificial Sequence
  synthetic
gtggtgcgagaacacagga

SEQ ID NO: 141 - DNA, 26 bp, Artificial Sequence
  synthetic
ttacaatactgtatcctcaaccaatg

SEQ ID NO: 142 - DNA, 28 bp, Artificial Sequence
  synthetic
ctgtatcctcaaccaatgttgtgtcttc

SEQ ID NO: 143 - DNA, 28 bp, Artificial Sequence
  synthetic
gaagacacaacattggttgaggatacag

SEQ ID NO: 144 - DNA, 16 bp, Artificial Sequence
  synthetic
ggtggggcaaaaggac

SEQ ID NO: 145 - DNA, 19 bp, Artificial Sequence
  synthetic
cgtccttttgccccacctc

SEQ ID NO: 146 - DNA, 19 bp, Artificial Sequence
  synthetic
gaggtggggcaaaaggacg

SEQ ID NO: 147 - DNA, 20 bp, Artificial Sequence
  synthetic
cccatctcattggctgccac

SEQ ID NO: 148 - DNA, 20 bp, Artificial Sequence
  synthetic
gtggcagccaatgagatggg

SEQ ID NO: 149 - DNA, 20 bp, Artificial Sequence
  synthetic
tagctggttgtctgtctgcg

SEQ ID NO: 150 - DNA, 22 bp, Artificial Sequence
  synthetic
ttgagtgtgatgaccatgggag

SEQ ID NO: 151 - DNA, 28 bp, Artificial Sequence
  synthetic
gacctcgataaaacctatttgagagcgc

SEQ ID NO: 152 - DNA, 28 bp, Artificial Sequence
  synthetic
gcgctctcaaataggttttatcgaggtc

SEQ ID NO: 153 - DNA, 29 bp, Artificial Sequence
  synthetic
ctcctctctttgtgtattggagagttatc

SEQ ID NO: 154 - DNA, 29 bp, Artificial Sequence
  synthetic
gataactctccaatacacaaagagaggag

SEQ ID NO: 155 - DNA, 19 bp, Artificial Sequence
  synthetic
cttcagttgcaggccaccc

SEQ ID NO: 156 - DNA, 19 bp, Artificial Sequence
  synthetic
gggtggcctgcaactgaag

SEQ ID NO: 157 - DNA, 29 bp, Artificial Sequence
  synthetic
gaaaaggatcaatcatgtcagcgttgtag

SEQ ID NO: 158 - DNA, 29 bp, Artificial Sequence
  synthetic
ctacaacgctgacatgattgatccttttc

SEQ ID NO: 159 - DNA, 20 bp, Artificial Sequence
  synthetic
cggtccatccaagcttccac

SEQ ID NO: 160 - DNA, 30 bp, Artificial Sequence
  synthetic
ggcacatccagtatcggcacccacggtcac

SEQ ID NO: 161 - DNA, 30 bp, Artificial Sequence
  synthetic
gtgaccgtgggtgccgatactggatgtgcc

SEQ ID NO: 162 - DNA, 30 bp, Artificial Sequence; identical to SEQ ID NO: 91
  synthetic

SEQ ID NO: 163 - DNA, 30 bp, Artificial Sequence; identical to SEQ ID NO: 90
  synthetic

SEQ ID NO: 164 - DNA, 30 bp, Artificial Sequence
  synthetic
ggctatcgtgattgctgctcccacgccagc

SEQ ID NO: 165 - DNA, 30 bp, Artificial Sequence
  synthetic
gctggcgtgggagcagcaatcacgatagcc

SEQ ID NO: 166 - DNA, 24 bp, Artificial Sequence
  synthetic
cagaagaagagaggaggaaagacc

SEQ ID NO: 167 - DNA, 21 bp, Artificial Sequence
  synthetic
ggccctcctggtttcttagac

SEQ ID NO: 168 - DNA, 21 bp, Artificial Sequence
  synthetic
gtctaagaaaccaggagggcc

SEQ ID NO: 169 - DNA, 22 bp, Artificial Sequence
  synthetic
cagctcacacaggcgaactact

SEQ ID NO: 170 - DNA, 22 bp, Artificial Sequence
  synthetic
agtagttcgcctgtgtgagctg

SEQ ID NO: 171 - DNA, 20 bp, Artificial Sequence
  synthetic
tggatggccttccccattat

SEQ ID NO: 172 - DNA, 25 bp, Artificial Sequence
  synthetic
cattataagctgcaataaacaagtt

SEQ ID NO: 173 - DNA, 19 bp, Artificial Sequence
  synthetic
gggtcggcatggcatctcc

SEQ ID NO: 174 - DNA, 19 bp, Artificial Sequence
  synthetic
tcctgtgttctcgcaccac

SEQ ID NO: 175 - DNA, 19 bp, Artificial Sequence
  synthetic
gtggtgcgagaacacagga

SEQ ID NO: 176 - DNA, 26 bp, Artificial Sequence
  synthetic
ttacaatactgtatcctcaaccaatg

SEQ ID NO: 177 - DNA, 28 bp, Artificial Sequence
  synthetic
ctgtatcctcaaccaatgttgtgtcttc

SEQ ID NO: 178 - DNA, 28 bp, Artificial Sequence
  synthetic
gaagacacaacattggttgaggatacag

SEQ ID NO: 179 - DNA, 16 bp, Artificial Sequence
  synthetic
ggtggggcaaaaggac

SEQ ID NO: 180 - DNA, 19 bp, Artificial Sequence
  synthetic
cgtccttttgccccacctc

SEQ ID NO: 181 - DNA, 19 bp, Artificial Sequence
  synthetic
gaggtggggcaaaaggacg

SEQ ID NO: 182 - DNA, 20 bp, Artificial Sequence
  synthetic
cccatctcattggctgccac

SEQ ID NO: 183 - DNA, 20 bp, Artificial Sequence
  synthetic
gtggcagccaatgagatggg

SEQ ID NO: 184 - DNA, 20 bp, Artificial Sequence
  synthetic
tagctggttgtctgtctgcg

SEQ ID NO: 185 - DNA, 22 bp, Artificial Sequence
  synthetic
ttgagtgtgatgaccatgggag

SEQ ID NO: 186 - DNA, 28 bp, Artificial Sequence
  synthetic
gacctcgataaaacctatttgagagcgc

SEQ ID NO: 187 - DNA, 28 bp, Artificial Sequence
  synthetic
gcgctctcaaataggttttatcgaggtc

SEQ ID NO: 188 - DNA, 29 bp, Artificial Sequence
  synthetic
ctcctctctttgtgtattggagagttatc

SEQ ID NO: 189 - DNA, 29 bp, Artificial Sequence
  synthetic
gataactctccaatacacaaagagaggag

SEQ ID NO: 190 - DNA, 19 bp, Artificial Sequence
  synthetic
cttcagttgcaggccaccc

SEQ ID NO: 191 - DNA, 19 bp, Artificial Sequence
  synthetic
gggtggcctgcaactgaag

SEQ ID NO: 192 - DNA, 29 bp, Artificial Sequence
  synthetic
gaaaaggatcaatcatgtcagcgttgtag

SEQ ID NO: 193 - DNA, 29 bp, Artificial Sequence
  synthetic
ctacaacgctgacatgattgatccttttc

SEQ ID NO: 194 - DNA, 20 bp, Artificial Sequence
  synthetic
cggtccatccaagcttccac

SEQ ID NO: 195 - DNA, 30 bp, Artificial Sequence
  synthetic
ggcacatccagtatcagcccgcacatagta

SEQ ID NO: 196 - DNA, 30 bp, Artificial Sequence
  synthetic
tactatgtgcgggctgatactggatgtgcc

SEQ ID NO: 197 - DNA, 30 bp, Artificial Sequence
  synthetic
aaactccccctttactgtggtccaagtgcc

SEQ ID NO: 198 - DNA, 30 bp, Artificial Sequence
  synthetic
ggcacttggaccacagtaaagggggagttt

SEQ ID NO: 199 - DNA, 30 bp, Artificial Sequence
  synthetic
catgtcaatcaccactgctcccacgccagc

SEQ ID NO: 200 - DNA, 30 bp, Artificial Sequence
  synthetic
gctggcgtgggagcagtggtgattgacatg

SEQ ID NO: 201 - DNA, 24 bp, Artificial Sequence
  synthetic
cagaagaagagaggaggaaagacc

SEQ ID NO: 202 - DNA, 21 bp, Artificial Sequence
  synthetic
ggccctcctggtttcttagac

SEQ ID NO: 203 - DNA, 21 bp, Artificial Sequence
  synthetic
gtctaagaaaccaggagggcc

SEQ ID NO: 204 - DNA, 22 bp, Artificial Sequence
  synthetic
cagctcacacaggcgaactact

SEQ ID NO: 205 - DNA, 22 bp, Artificial Sequence
  synthetic
agtagttcgcctgtgtgagctg

SEQ ID NO: 206 - DNA, 20 bp, Artificial Sequence
  synthetic
tggatggccttccccattat

SEQ ID NO: 207 - DNA, 25 bp, Artificial Sequence
  synthetic
cattataagctgcaataaacaagtt

SEQ ID NO: 208 - DNA, 19 bp, Artificial Sequence
  synthetic
gggtcggcatggcatctcc

SEQ ID NO: 209 - DNA, 19 bp, Artificial Sequence
  synthetic
tcctgtgttctcgcaccac

SEQ ID NO: 210 - DNA, 19 bp, Artificial Sequence
  synthetic
gtggtgcgagaacacagga

SEQ ID NO: 211 - DNA, 26 bp, Artificial Sequence
  synthetic
ttacaatactgtatcctcaaccaatg

SEQ ID NO: 212 - DNA, 28 bp, Artificial Sequence
  synthetic
ctgtatcctcaaccaatgttgtgtcttc

SEQ ID NO: 213 - DNA, 28 bp, Artificial Sequence
  synthetic
gaagacacaacattggttgaggatacag

SEQ ID NO: 214 - DNA, 16 bp, Artificial Sequence
  synthetic
ggtggggcaaaaggac

SEQ ID NO: 215 - DNA, 19 bp, Artificial Sequence
  synthetic
cgtccttttgccccacctc

SEQ ID NO: 216 - DNA, 19 bp, Artificial Sequence
  synthetic
gaggtggggcaaaaggacg

SEQ ID NO: 217 - DNA, 20 bp, Artificial Sequence
  synthetic
cccatctcattggctgccac

SEQ ID NO: 218 - DNA, 20 bp, Artificial Sequence
  synthetic
gtggcagccaatgagatggg

SEQ ID NO: 219 - DNA, 20 bp, Artificial Sequence
  synthetic
tagctggttgtctgtctgcg

SEQ ID NO: 220 - DNA, 22 bp, Artificial Sequence
  synthetic
ttgagtgtgatgaccatgggag

SEQ ID NO: 221 - DNA, 28 bp, Artificial Sequence
  synthetic
gacctcgataaaacctatttgagagcgc

SEQ ID NO: 222 - DNA, 28 bp, Artificial Sequence
  synthetic
gcgctctcaaataggttttatcgaggtc

SEQ ID NO: 223 - DNA, 29 bp, Artificial Sequence
  synthetic
ctcctctctttgtgtattggagagttatc

SEQ ID NO: 224 - DNA, 29 bp, Artificial Sequence
  synthetic
gataactctccaatacacaaagagaggag

SEQ ID NO: 225 - DNA, 19 bp, Artificial Sequence
  synthetic
cttcagttgcaggccaccc

SEQ ID NO: 226 - DNA, 19 bp, Artificial Sequence
  synthetic
gggtggcctgcaactgaag

SEQ ID NO: 227 - DNA, 29 bp, Artificial Sequence
  synthetic
gaaaaggatcaatcatgtcagcgttgtag

SEQ ID NO: 228 - DNA, 29 bp, Artificial Sequence
  synthetic
ctacaacgctgacatgattgatccttttc

SEQ ID NO: 229 - DNA, 20 bp, Artificial Sequence
  synthetic
cggtccatccaagcttccac

SEQ ID NO: 230 - DNA, 30 bp, Artificial Sequence
  synthetic
ggcacatccagtatcagctcgcacgtatgt

SEQ ID NO: 231 - DNA, 30 bp, Artificial Sequence
  synthetic
acatacgtgcgagctgatactggatgtgcc

SEQ ID NO: 232 - DNA, 30 bp, Artificial Sequence
  synthetic
tccattcatggtctttgctcccacgccagc

SEQ ID NO: 233 - DNA, 30 bp, Artificial Sequence
  synthetic
gctggcgtgggagcaaagaccatgaatgga

SEQ ID NO: 234 - DNA, 24 bp, Artificial Sequence
  synthetic
cagaagaagagaggaggaaagacc

SEQ ID NO: 235 - DNA, 21 bp, Artificial Sequence
  synthetic
ggccctcctggtttcttagac

SEQ ID NO: 236 - DNA, 21 bp, Artificial Sequence
  synthetic
gtctaagaaaccaggagggcc

SEQ ID NO: 237 - DNA, 22 bp, Artificial Sequence
  synthetic
cagctcacacaggcgaactact

SEQ ID NO: 238 - DNA, 22 bp, Artificial Sequence
  synthetic
agtagttcgcctgtgtgagctg

SEQ ID NO: 239 - DNA, 20 bp, Artificial Sequence
  synthetic
tggatggccttccccattat

SEQ ID NO: 240 - DNA, 25 bp, Artificial Sequence
  synthetic
cattataagctgcaataaacaagtt

SEQ ID NO: 241 - DNA, 19 bp, Artificial Sequence
  synthetic
gggtcggcatggcatctcc

SEQ ID NO: 242 - DNA, 19 bp, Artificial Sequence
  synthetic
tcctgtgttctcgcaccac

SEQ ID NO: 243 - DNA, 19 bp, Artificial Sequence
  synthetic
gtggtgcgagaacacagga

SEQ ID NO: 244 - DNA, 26 bp, Artificial Sequence
  synthetic
ttacaatactgtatcctcaaccaatg

SEQ ID NO: 245 - DNA, 28 bp, Artificial Sequence
  synthetic
ctgtatcctcaaccaatgttgtgtcttc

SEQ ID NO: 246 - DNA, 28 bp, Artificial Sequence
  synthetic
gaagacacaacattggttgaggatacag

SEQ ID NO: 247 - DNA, 16 bp, Artificial Sequence
  synthetic
ggtggggcaaaaggac

SEQ ID NO: 248 - DNA, 19 bp, Artificial Sequence
  synthetic
cgtccttttgccccacctc

SEQ ID NO: 249 - DNA, 19 bp, Artificial Sequence
  synthetic
gaggtggggcaaaaggacg

SEQ ID NO: 250 - DNA, 20 bp, Artificial Sequence
  synthetic
cccatctcattggctgccac

SEQ ID NO: 251 - DNA, 20 bp, Artificial Sequence
  synthetic
gtggcagccaatgagatggg

SEQ ID NO: 252 - DNA, 20 bp, Artificial Sequence
  synthetic
tagctggttgtctgtctgcg

SEQ ID NO: 253 - DNA, 22 bp, Artificial Sequence
  synthetic
ttgagtgtgatgaccatgggag

SEQ ID NO: 254 - DNA, 28 bp, Artificial Sequence
  synthetic
gacctcgataaaacctatttgagagcgc

SEQ ID NO: 255 - DNA, 28 bp, Artificial Sequence
  synthetic
gcgctctcaaataggttttatcgaggtc

SEQ ID NO: 256 - DNA, 29 bp, Artificial Sequence
  synthetic
ctcctctctttgtgtattggagagttatc

SEQ ID NO: 257 - DNA, 29 bp, Artificial Sequence
  synthetic
gataactctccaatacacaaagagaggag

SEQ ID NO: 258 - DNA, 19 bp, Artificial Sequence
  synthetic
cttcagttgcaggccaccc

SEQ ID NO: 259 - DNA, 19 bp, Artificial Sequence
  synthetic
gggtggcctgcaactgaag

SEQ ID NO: 260 - DNA, 29 bp, Artificial Sequence
  synthetic
gaaaaggatcaatcatgtcagcgttgtag

SEQ ID NO: 261 - DNA, 29 bp, Artificial Sequence
  synthetic
ctacaacgctgacatgattgatccttttc

SEQ ID NO: 262 - DNA, 20 bp, Artificial Sequence
  synthetic
cggtccatccaagcttccac

SEQ ID NO: 263 - DNA, 27 bp, Artificial Sequence
  synthetic
cacatccagtatcagctcgggtataag

SEQ ID NO: 264 - DNA, 27 bp, Artificial Sequence
  synthetic
cttatacccgagctgatactggatgtg

SEQ ID NO: 265 - DNA, 60 bp, Artificial Sequence
  synthetic
ccgacttatatctatggcacatccagtatcagctcgggtataagcgattccacagaggat

SEQ ID NO: 266 - DNA, 60 bp, Artificial Sequence
  synthetic
atcctctgtggaatcgcttatacccgagctgatactggatgtgccatagatataagtcgg

SEQ ID NO: 267 - DNA, 20 bp, Artificial Sequence
  synthetic
aaacatccggttccccatcc

SEQ ID NO: 268 - DNA, 20 bp, Artificial Sequence
  synthetic
attcgaccgacatatgcccc

SEQ ID NO: 269 - DNA, 25 bp, Artificial Sequence
  synthetic
ccaagaatggctcaacaaactcacc

SEQ ID NO: 270 - DNA, 25 bp, Artificial Sequence
  synthetic
ggtgagtttgttgagccattcttgg

SEQ ID NO: 271 - DNA, 20 bp, Artificial Sequence
  synthetic
ggattgtcactgctcccacg

SEQ ID NO: 272 - DNA, 20 bp, Artificial Sequence
  synthetic
cgtgggagcagtgacaatcc

SEQ ID NO: 273 - DNA, 60 bp, Artificial Sequence
  synthetic
atcagtagtgacaaccacttggattgtcactgctcccacgccagcaatcaagccaatcat

SEQ ID NO: 274 - DNA, 60 bp, Artificial Sequence
  synthetic
atgattggcttgattgctggcgtgggagcagtgacaatccaagtggttgtcactactgat

SEQ ID NO: 275 - DNA, 24 bp, Artificial Sequence
  synthetic
cagaagaagagaggaggaaagacc

SEQ ID NO: 276 - DNA, 21 bp, Artificial Sequence
  synthetic
ggccctcctggtttcttagac

SEQ ID NO: 277 - DNA, 21 bp, Artificial Sequence
  synthetic
gtctaagaaaccaggagggcc

SEQ ID NO: 278 - DNA, 22 bp, Artificial Sequence
  synthetic
cagctcacacaggcgaactact

SEQ ID NO: 279 - DNA, 22 bp, Artificial Sequence
  synthetic
agtagttcgcctgtgtgagctg

SEQ ID NO: 280 - DNA, 20 bp, Artificial Sequence
  synthetic
tggatggccttccccattat

SEQ ID NO: 281 - DNA, 25 bp, Artificial Sequence
  synthetic
cattataagctgcaataaacaagtt

SEQ ID NO: 282 - DNA, 19 bp, Artificial Sequence
  synthetic
gggtcggcatggcatctcc

SEQ ID NO: 283 - DNA, 19 bp, Artificial Sequence
  synthetic
tcctgtgttctcgcaccac

SEQ ID NO: 284 - DNA, 19 bp, Artificial Sequence
  synthetic
gtggtgcgagaacacagga

SEQ ID NO: 285 - DNA, 26 bp, Artificial Sequence
  synthetic
ttacaatactgtatcctcaaccaatg

SEQ ID NO: 286 - DNA, 28 bp, Artificial Sequence
  synthetic
ctgtatcctcaaccaatgttgtgtcttc

SEQ ID NO: 287 - DNA, 28 bp, Artificial Sequence
  synthetic
gaagacacaacattggttgaggatacag

SEQ ID NO: 288 - DNA, 16 bp, Artificial Sequence
  synthetic
ggtggggcaaaaggac

SEQ ID NO: 289 - DNA, 19 bp, Artificial Sequence
  synthetic
cgtccttttgccccacctc

SEQ ID NO: 290 - DNA, 19 bp, Artificial Sequence
  synthetic
gaggtggggcaaaaggacg

SEQ ID NO: 291 - DNA, 20 bp, Artificial Sequence
  synthetic
cccatctcattggctgccac

SEQ ID NO: 292 - DNA, 20 bp, Artificial Sequence
  synthetic
gtggcagccaatgagatggg

SEQ ID NO: 293 - DNA, 20 bp, Artificial Sequence
  synthetic
tagctggttgtctgtctgcg

SEQ ID NO: 294 - DNA, 22 bp, Artificial Sequence
  synthetic
ttgagtgtgatgaccatgggag

SEQ ID NO: 295 - DNA, 28 bp, Artificial Sequence
  synthetic
gacctcgataaaacctatttgagagcgc

SEQ ID NO: 296 - DNA, 28 bp, Artificial Sequence
  synthetic
gcgctctcaaataggttttatcgaggtc

SEQ ID NO: 297 - DNA, 29 bp, Artificial Sequence
  synthetic
ctcctctctttgtgtattggagagttatc

SEQ ID NO: 298 - DNA, 29 bp, Artificial Sequence
  synthetic
gataactctccaatacacaaagagaggag

SEQ ID NO: 299 - DNA, 19 bp, Artificial Sequence
  synthetic
cttcagttgcaggccaccc

SEQ ID NO: 300 - DNA, 19 bp, Artificial Sequence
  synthetic
gggtggcctgcaactgaag

SEQ ID NO: 301 - DNA, 29 bp, Artificial Sequence
  synthetic
gaaaaggatcaatcatgtcagcgttgtag

SEQ ID NO: 302 - DNA, 29 bp, Artificial Sequence
  synthetic
ctacaacgctgacatgattgatccttttc

SEQ ID NO: 303 - DNA, 20 bp, Artificial Sequence
  synthetic
cggtccatccaagcttccac

SEQ ID NO: 304 - DNA, 30 bp, Artificial Sequence
  synthetic
ggcacatccagtatcggctcgcacaaaata

SEQ ID NO: 305 - DNA, 30 bp, Artificial Sequence
  synthetic
tattttgtgcgagccgatactggatgtgcc

SEQ ID NO: 306 - DNA, 30 bp, Artificial Sequence
  synthetic
cggttccatgtattctcctcgaaccgttgt

SEQ ID NO: 307 - DNA, 30 bp, Artificial Sequence
  synthetic
acaacggttcgaggagaatacatggaaccg

SEQ ID NO: 308 - DNA, 30 bp, Artificial Sequence
  synthetic
gtcaatcaccacaactgctcccacgccagc

SEQ ID NO: 309 - DNA, 30 bp, Artificial Sequence
  synthetic
gctggcgtgggagcagttgtggtgattgac

SEQ ID NO: 310 - DNA, 24 bp, Artificial Sequence
  synthetic
cagaagaagagaggaggaaagacc

SEQ ID NO: 311 - DNA, 21 bp, Artificial Sequence
  synthetic
ggccctcctggtttcttagac

SEQ ID NO: 312 - DNA, 21 bp, Artificial Sequence
  synthetic
gtctaagaaaccaggagggcc

SEQ ID NO: 313 - DNA, 22 bp, Artificial Sequence
  synthetic
cagctcacacaggcgaactact

SEQ ID NO: 314 - DNA, 22 bp, Artificial Sequence
  synthetic
agtagttcgcctgtgtgagctg

SEQ ID NO: 315 - DNA, 20 bp, Artificial Sequence
  synthetic
tggatggccttccccattat

SEQ ID NO: 316 - DNA, 25 bp, Artificial Sequence
  synthetic
cattataagctgcaataaacaagtt

SEQ ID NO: 317 - DNA, 19 bp, Artificial Sequence
  synthetic
gggtcggcatggcatctcc

SEQ ID NO: 318 - DNA, 30 bp, Artificial Sequence
  synthetic
atgccatgccgacccagacgtagccaagta

SEQ ID NO: 319 - DNA, 30 bp, Artificial Sequence
  synthetic
tacttggctacgtctgggtcggcatggcat

SEQ ID NO: 320 - DNA, 30 bp, Artificial Sequence
  synthetic
catcgtcacacttcagttgaacacaggatc

SEQ ID NO: 321 - DNA, 30 bp, Artificial Sequence
  synthetic
gatcctgtgttcaactgaagtgtgacgatg

SEQ ID NO: 322 - DNA, 24 bp, Artificial Sequence
  synthetic
ccgtatttacccaaaggagtggac

SEQ ID NO: 323 - DNA, 30 bp, Artificial Sequence
  synthetic
actcttcaccagcgagcgcacgcccaatct

SEQ ID NO: 324 - DNA, 30 bp, Artificial Sequence
  synthetic
agattgggcgtgcgctcgctggtgaagagt

SEQ ID NO: 325 - DNA, 30 bp, Artificial Sequence
  synthetic
tagctccgaatttgcccgctgggacatagc

SEQ ID NO: 326 - DNA, 30 bp, Artificial Sequence
  synthetic
gctatgtcccagcgggcaaattcggagcta

SEQ ID NO: 327 - DNA, 30 bp, Artificial Sequence
  synthetic
tccacatccgaagtcggcctgcaccataac

SEQ ID NO: 328 - DNA, 30 bp, Artificial Sequence
  synthetic
gttatggtgcaggccgacttcggatgtgga

SEQ ID NO: 329 - DNA, 20 bp, Artificial Sequence
  synthetic
tgcagcgcattgtcattgaa

SEQ ID NO: 330 - DNA, 20 bp, Artificial Sequence
  synthetic
ttcaatgacaatgcgctgca

SEQ ID NO: 331 - DNA, 30 bp, Artificial Sequence
  synthetic
tgtggtcagatgaaatcccataactccgaa

SEQ ID NO: 332 - DNA, 30 bp, Artificial Sequence
  synthetic
ttcggagttatgggatttcatctgaccaca

SEQ ID NO: 333 - DNA, 20 bp, Artificial Sequence
  synthetic
ctcgcttttcctccttgctg

SEQ ID NO: 334 - DNA, 36 bp, Artificial Sequence
  synthetic
gcaaaagttttttaaaactgtttaccagatcgttgc

SEQ ID NO: 335 - DNA, 36 bp, Artificial Sequence
  synthetic
gcaacgatctggtaaacagttttaaaaaacttttgc

SEQ ID NO: 336 - DNA, 20 bp, Artificial Sequence
  synthetic
tggatggccttccccattat

SEQ ID NO: 337 - DNA, 25 bp, Artificial Sequence
  synthetic
cattataagctgcaataaacaagtt

SEQ ID NO: 338 - DNA, 19 bp, Artificial Sequence
  synthetic
gggtcggcatggcatctcc

SEQ ID NO: 339 - DNA, 30 bp, Artificial Sequence; identical to SEQ ID NO: 318
  synthetic

SEQ ID NO: 340 - DNA, 30 bp, Artificial Sequence; identical to SEQ ID NO: 319
  synthetic

SEQ ID NO: 341 - DNA, 30 bp, Artificial Sequence; identical to SEQ ID NO: 320
  synthetic

SEQ ID NO: 342 - DNA, 30 bp, Artificial Sequence; identical to SEQ ID NO: 321
  synthetic

SEQ ID NO: 343 - DNA, 24 bp, Artificial Sequence
  synthetic
ccgtatttacccaaaggagtggac

SEQ ID NO: 344 - DNA, 30 bp, Artificial Sequence; identical to SEQ ID NO: 323
  synthetic

SEQ ID NO: 345 - DNA, 30 bp, Artificial Sequence; identical to SEQ ID NO: 324
  synthetic

SEQ ID NO: 346 - DNA, 30 bp, Artificial Sequence; identical to SEQ ID NO: 325
  synthetic

SEQ ID NO: 347 - DNA, 30 bp, Artificial Sequence; identical to SEQ ID NO: 326
  synthetic

SEQ ID NO: 348 - DNA, 30 bp, Artificial Sequence
  synthetic
tccacatccgaagtcagcatgcacgttcac

SEQ ID NO: 349 - DNA, 30 bp, Artificial Sequence
  synthetic
gtgaacgtgcatgctgacttcggatgtgga

SEQ ID NO: 350 - DNA, 17 bp, Artificial Sequence
  synthetic
gcatggaccaactaccg

SEQ ID NO: 351 - DNA, 29 bp, Artificial Sequence
  synthetic
ggaaatctctgttgctcattccaagacag

SEQ ID NO: 352 - DNA, 29 bp, Artificial Sequence
  synthetic
ctgtcttggaatgagcaacagagatttcc

SEQ ID NO: 353 - DNA, 30 bp, Artificial Sequence
  synthetic
gttggagagagtgactcccataactccgaa

SEQ ID NO: 354 - DNA, 30 bp, Artificial Sequence
  synthetic
ttcggagttatgggagtcactctctccaac

SEQ ID NO: 355 - DNA, 20 bp, Artificial Sequence
  synthetic
ctcgcttttcctccttgctg

SEQ ID NO: 356 - DNA, 36 bp, Artificial Sequence; identical to SEQ ID NO: 334
  synthetic

SEQ ID NO: 357 - DNA, 36 bp, Artificial Sequence; identical to SEQ ID NO: 335
  synthetic

SEQ ID NO: 358 - DNA, 20 bp, Artificial Sequence
  synthetic
tggatggccttccccattat

SEQ ID NO: 359 - DNA, 25 bp, Artificial Sequence
  synthetic
cattataagctgcaataaacaagtt

SEQ ID NO: 360 - DNA, 19 bp, Artificial Sequence
  synthetic
gggtcggcatggcatctcc

SEQ ID NO: 361 - DNA, 30 bp, Artificial Sequence; identical to SEQ ID NO: 318
  synthetic

SEQ ID NO: 362 - DNA, 30 bp, Artificial Sequence; identical to SEQ ID NO: 319
  synthetic

SEQ ID NO: 363 - DNA, 30 bp, Artificial Sequence; identical to SEQ ID NO: 320
  synthetic

SEQ ID NO: 364 - DNA, 30 bp, Artificial Sequence; identical to SEQ ID NO: 321
  synthetic

SEQ ID NO: 365 - DNA, 24 bp, Artificial Sequence
  synthetic
ccgtatttacccaaaggagtggac

SEQ ID NO: 366 - DNA, 30 bp, Artificial Sequence; identical to SEQ ID NO: 323
  synthetic

SEQ ID NO: 367 - DNA, 30 bp, Artificial Sequence; identical to SEQ ID NO: 324
  synthetic

SEQ ID NO: 368 - DNA, 30 bp, Artificial Sequence; identical to SEQ ID NO: 325
  synthetic

SEQ ID NO: 369 - DNA, 30 bp, Artificial Sequence; identical to SEQ ID NO: 326
  synthetic

SEQ ID NO: 370 - DNA, 30 bp, Artificial Sequence
  synthetic
tccacatccgaagtcagcagagacggctgt

SEQ ID NO: 371 - DNA, 30 bp, Artificial Sequence
  synthetic
acagccgtctctgctgacttcggatgtgga

SEQ ID NO: 372 - DNA, 20 bp, Artificial Sequence
  synthetic
tgcacctgatgctgtatgcc

SEQ ID NO: 373 - DNA, 20 bp, Artificial Sequence
  synthetic
ggcatacagcatcaggtgca

SEQ ID NO: 374 - DNA, 30 bp, Artificial Sequence
  synthetic
tctagtgacctccgctcccataactccgaa

SEQ ID NO: 375 - DNA, 30 bp, Artificial Sequence
  synthetic
ttcggagttatgggagcggaggtcactaga

SEQ ID NO: 376 - DNA, 20 bp, Artificial Sequence
  synthetic
ctcgcttttcctccttgctg

SEQ ID NO: 377 - DNA, 36 bp, Artificial Sequence; identical to SEQ ID NO: 334
  synthetic

SEQ ID NO: 378 - DNA, 36 bp, Artificial Sequence; identical to SEQ ID NO: 335
  synthetic

SEQ ID NO: 379 - DNA, 20 bp, Artificial Sequence
  synthetic
tggatggccttccccattat

SEQ ID NO: 380 - DNA, 25 bp, Artificial Sequence
  synthetic
cattataagctgcaataaacaagtt

SEQ ID NO: 381 - DNA, 19 bp, Artificial Sequence
  synthetic
gggtcggcatggcatctcc

SEQ ID NO: 382 - DNA, 122 bp, Autographa californica nucleopolyhedrovirus
gtcgagtgattgtaaataaaatgtaatttacagtatagtattttaattaatatacaaatgatttgataataattcttatttaactataatatattgtgttgggttgaattaaaggtccgtat

SEQ ID NO: 383 - DNA, 129 bp, Autographa californica nucleopolyhedrovirus
atcatggagataattaaaatgataaccatctcgcaaataaataagtattttactgttttcgtaacagttttgtaataaaaaaacctataaatattccggattattcataccgtcccaccatcgggcgcg

SEQ ID NO: 384 - protein, 3474 aa, Artificial Sequence
  synthetic
MSGLGGLLPLRGKKKKAPVIQSQGRVLPKSDWKGAPKQDLNKKKAKKDETKGQNWPRRINPRTGQWSAIEGSGARLWRSIFSTDLIGGLLLLIAILSNLYEKVRRDITELKRRVTRLEKSRASLILTPMVLLCLAILAAGVTLSNFQGKVMMTVNATDVTDIITIPTAAGKNLCIVRAMDVGHMCDDTITYECPVLSAGNDPEDIDCWCTKLAVYVRYGRCTKTRHSRRSRRSLTVQTHGESTLSNKKGAWMDSTKATRYLVKTESWILRNPGYALVAAVIGWMLGSNTMQRVVFAVLLLLVAPAYSFNCLGMSNRDFLEGVSGATWVDLVLEGDSCVTIMSKDKPTIDVKMMNMEAANLAEVRSYCYLATVSELSTKAACPTMGEAHNDKRADPSFVCKQGVVDRGWGNGCGLFGKGSIDTCAKFACSTKATGRTILKENIKYEVAIFVHGPTTVESHGNYFTQTGAAQAGRFSITPAAPSYTLKLGEYGEVTVDCEPRSGIDTSAYYVMTVGTKTFLVHREWFMDLNLPWSSAESNVWRNRETLMEFEEPHATKQSVIALGSQEGALHQALAGAIPVEFSSNTVKLTSGHLKCRVKMEKLQLKGTTYGVCSKAFRFLGTPADTGHGTVVLELQYTGTDGPCKIPISSVASLNDLTPVGRLVTVNPFVSVSTANAKVLIELEPPFGDSYIVVGRGEQQINHHWHKSGSSIGKAFTATLKGAQRLAALGDTAWDFGSVGGVFTSVGKAVHQVFGGAFRSLFGGMSWITQGLLGALLLWMGINARDRSIALTFLAVGGVLLFLSVNVHADIGCGIDFDRKTYTCGSGLFVWKGLGKYPTADHSVEFASYDFLSAYLQEQFKSEKKVCIICEDIVQCEAARKAAAAVYKNLGHPFVYVNTSDSYGKVFAEIPKRVHTVSVGVDVVEMAMMTRENKPVGPFGDLPRSMVSWKSIPETEEHPVLRVLTSSSDYQKVCGKAIGFQYDFVGYRRTMYGSNVQLKISKKVSIECPTYLAGVAVKNDRTVFTDGMFWMSSKRENGTYAITELEMEQSHKCIWPDQYTPDATLTPRDNEMFVPPEWGGPMSKANHIPGYKMQTGFPWNKAPIRFVEGSVPGTIVTQISHCDGRGIAAEVNPATQPNWCCKSCTRIFHFEVDGKLYYPMEIRPDPKGGEQQKVPVVETPIGDEETETVGGWLGRMYNIPGAEGSYADFRLPKLPNSRPSAMVGSLVNLLCLMFSIQIVTKTMRARTLMRFYLCCLVFMFFGMPTLFGLSGFLAWMMILPISHNSVTMCNLTVHLWAVLLNQSSAMFLWGLTLRSQIQRSTAGQMLLFTMQMLHHAIYAHSWVFGWVIEVCLSVGLMMNLLTVIDTVHPKLIAYLLFFGWKTGMCVVCAWLLIYSIRRWNSIVAAAPAAGGWRSGYRTMMSSSLIVIFISVGIAGVIASDYGGYPAAAAVTAALLIMGIKMFDFLTTRLSLEFVSAGMFPEGVEKAFEPDSVSDLFRASFTVDGIKLQDHVEPIPILFAILYIFIGAVACKVNPALGIVYAIAMFATPLPELMRLYMMTIYSSTFRTDTLLGMAIPETEPELSQDFGPIPDGIYRVNNHGFSVKSHRGVGIVKNGVFHTLMHVTLNEPLAWQNRLVGPSMGHSLKDYVTYGGNWQLPDFDIVNEVGIMVCGRDRSIQYKRHEVGTIMIDDKRVMYFTHDYGHGSSGSPIFVNGEPVALYGFGFHLYNRYRSIVLPIPREEVLDGASNEGIPAEHGTMRNKFFVDWHPGKGKTRKVIVKEVLNALNLARRIVVLAPTRVVLAEITKAIGENTSKTPSKNLAFTGHNIVTVACHATFTDYVLRHGLSKFKAHEVIMDECHFLDPRSIAARGILEHLATKRGVKVTFMSATIPGREPSLGSNFEISEQALQFPRDVNQRWIETVARGKTVAFVPSHRVGDKLARGCPQAISLHRNNFDTNYSTAMDESIKFIYTTDISEMGANFSADTVIDFRVAIKPKISSEFAVTLEPTPITRSSMIQRRGRVGRQRPGTYIYPVDKGVEDASDQLACWTEAQMLLDQLDLTMMAEEVRQSNIPGAYKLVGRSLDIFRKLLEKDDIPIWLSWKWADSVQQQYSILFEGERQENVARVVNTRDYASLEYKPKFVDARFERLGWDQRKLSIQFYMNTRSFITFATLSHVISQVIEAGVVNSAWKRIGDVSIIFTEGGDPHAKDETIMAWTILVGGVLGALGFLIVAWGMKAVLRVIFGSRDKHLSVPTLVADFQPYIVCIVPIALHLAGVPIPMTIVFFAMLFLTYPLMYKSAGQRSYVDIDLVKWILLGGCIVTGVICWEMRLLPNISSDISAILNRQRQREDTPTFDASPPWEWLDLAQPVPHNVELTSVVITTFTTWLFLHQIVGWSYESEWLKSYFDHKGVGQIMGGFRLDTISWGSALSGLLGTATYASWGAILTGLGGAVVYFFLMVSMLKWNFSGGATTGLENNVMRNDRETGLGNRPANDNRRSLLYGVVAAECLVWLFCFRTATDAIVVACLVSYCLWIINNPASPHHKNTDLGSACSFIGLLYCTCPTQKCIQVLMRFALARLNMNTRSLEKSATGGLGHRWKKLLNAMTLLEFNAYRSCGVDETEKGDYVSRGGLKLREITMKYGWKPEGICVDLGCGRGGWSQHLAMDPRVTRVESFTLGGTARENPQPIKTLGHNLIRFKSGVNVYNMTPTHANTIVCDIGESDPKPEVETSRTLRVLKTLELWLARNPNAEFVCKVLCPYPVEVLKCLETLQHKYGGRIIRSTYSRNSSAEMYYISGGRNNMVKVIFTTLHSLISRIRTRPEKIVKESVSLPVGTRSDPGHKIKSMDPKMIATRVEKIKKEHADTWFVDNNHPYQSFRYVGSYVTDDVTPGGQTVNPLMRKMMWPWETVGGVVNFMMTDVSTYAQQKVLREKVDTLSPEPPNDIQRVNRWITEFLCASFMRRGLKPRILTMEQYINNVKSSAAIGSWSSDVPWSSVREALADKRFHQMVEEERKLHLAGDCRMCVYNTMGKKEKKPSAMGVAKGSRTIWYMWLGSRFLEYEALGFLNEDHWVSRDNLACGVGGVGVNYFGYYLQEIARKGKFFIADDIAGWDTRINESDLADEEFLIMSLICDPYHRSLAKAVFRFAYQNIVALFPRNHPGFGSGTVMDVVARTDQRGSGQVVTYALNTITNAKIQLGRMLEAEGLLDAHEHVIKKWLNDNGEEALSGMVVAGDDVVVATNNGNFSRSLRYLHLNGKIRKDIDPSLPSKVETNWEVVEFCSHHYHVMTLKDGRRIIVPCREQNEIIGRGRIQKGGLVTLAESACLAKAYGQMWALYFFHRRDLRMAFLAITSSVPIDWFPEGRTSWSIHQNKEWMTTEDMLRVWNTVWIQDNPWMEDKMEIENWRDIPYLPKSMDLKCGSLIGTKERAAWSKDLPSTVTAVRKIIDQDTKTENVYQDFLGGMGRFQTYTDPMAT

SEQ ID NO: 385 - DNA, 12120 bp, Artificial Sequence
  synthetic
gggtcggcatggcatctccacctcctcgcggtccgacctgggcatccgaaggaggacgtcgtccactcggatggctaagggagagccacttttctctcgattctctatcggaatctagggagctcggatccagacatgataagatacattgatgagtttggacaaaccacaactagaatgcagtgaaaaaaatgctttatttgtgaaatttgtgatgctattgctttatttgtaaccattataagctgcaataaacaagttaacaacaacaattgctcgagggggggcccggtaccttgaagctgtccctgatggtcgtcatctacctgcctggacagcatggcctgcaacgcgggcatcccgatgccgccggaagcgagaagaatcataatggggaaggccatccagcctcgcgtcggcgcttaaggatcatgatgataaacaatgtatggtgctaatgttgcttcaacaacaattctgttgaactgtgttttcatgtttgccaacaagcacctttatactcggtggcctccccaccaccaacttttttgcactgcaaaaaaacacgcttttgcacgcgggcccatacatagtacaaactctacgtttcgtagactattttacataaatagtctacaccgttgtatacgctccaaatacactaccacacattgaacctttttgcagtgcaaaaaagtacgtgtcggcagtcacgtaggccggccttatcgggtcgcgtcctgtcacgtacgaatcacattatcggaccggacgagtgttgtcttatcgtgacaggacgccagcttcctgtgttgctaaccgcagccggacgcaactccttatcggaacaggacgcgcctccatatcagccgcgcgttatctcatgcgcgtgaccggacacgaggcgcccgtcccgcttatcgcgcctataaatacagcccgcaacgatctggtaaacagttttaaaagttaacccgtggttttaccctagtttcggtgaatttgccaattttacggaataactgtttgaaaggttcaaactctggtgtccaacgtttgtattaaaatgagtggattaggaggccttcttcccctccgagggaagaaaaagaaagcccctgtgatacaatcacagggcagggtcttgccgaagagcgactggaagggagctccgaaacaggatctaaataaaaagaaagcgaaaaaggacgagacgaaaggccagaattggccaagaagaattaacccccggactggacaatggtcggcaattgagggctctggtgctcggctgtggagaagcattttctctacagacttgatcggaggcttgttgttgttgatcgctattttatcaaatctctacgaaaaggttagacgtgacataacggaattgaaacgcagagtgactcgattggaaaaatctcgagctagtttgattttgaccccaatggtgttgctgtgtctggctatcctcgcggcaggcgtcactctctccaactttcaagggaaggtgatgatgacggtgaacgctactgacgtcacagacattatcacgataccaacggccgctggaaagaacctgtgcattgtcagagctatggatgtggggcacatgtgtgatgatactatcacctatgaatgtccagtgttgtcggccggaaatgatccagaagacattgactgctggtgcacgaagttagcagtctacgttaggtatggaagatgcaccaagacacgacactcaagacgcagcagaaggtcactaacagtgcagacgcatggagagagcaccctatcgaacaaaaagggggcctggatggacagcaccaaggctacaaggtacttggtaaaaacagaatcatggatcttgagaaaccctggatatgccttggtggcagctgtcattggatggatgctcggaagcaacaccatgcagcgtgtcgtgtttgccgtgttactgcttttggtagctccagcttacagctttaactgtcttggaatgagcaacagagatttcctggagggagtgtccggagcaacatgggtggacttggtccttgaaggtgacagctgtgtgaccattatgtccaaggacaagcccaccatcgatgtgaagatgatgaacatggaggccgctaacttagcagaagtccgcagttattgctacttagccactgtcagtgaactctccaccaaggctgcgtgcccaaccatgggggaagcccataatgacaagcgggctgacccatcttttgtgtgcaaacaaggagtagtggatagaggttggggcaatgggtgcggactttttggtaaaggaagcatcgacacatgcgccaaatttgcctgttcaaccaaggcaacgggaaggactatcttaaaggagaacattaagtatgaggtggctatctttgtgcatggaccaactaccgtggaatcgcatgggaactacttcacgcaaaccggagctgctcaggctgggagatttagtatcacccccgcggcaccctcttacactcttaagctcggagagtatggagaagtaacagtggactgtgaaccacgctcagggatagacaccagtgcatactatgtgatgactgtcgggacaaagactttcttggtccaccgtgagtggtttatggacctcaacctcccctggagcagtgctgaaagtaatgtttggaggaacagagagacgctaatggagtttgaagaaccacacgctacgaagcaatctgtgatagcattgggctctcaagagggagccctgcatcaagctctggcaggagccattcctgtggaattttcaagcaacactgtcaagctgacgtcaggccacctgaagtgtagggtgaagatggaaaaattgcagctgaaggggacaacttatggcgtctgttcaaaggccttcagattccttgggactcccgcagacacgggccatggtactgtggtactggaactgcagtacacaggcacggatggaccctgcaagatacccatttcatcagtagcttcattgaatgacctaacgccagtgggcaggttagttaccgtcaacccctttgtctccgtgtcaacggccaatgctaaagtcctgattgagttggaaccaccctttggagattcgtacatagtggtgggaagaggagagcaacagatcaaccatcactggcacaagtctggaagtagcattggcaaagctttcacagccaccctcaagggagctcagagactagcagctctgggagacacagcttgggactttggatcggttggaggagtgtttacctccgtgggaaaggctgtccatcaagtatttggtggagcattccgctcattgtttggaggcatgtcttggataactcagggtctgctgggggccctcctattgtggatgggtattaacgctcgtgatagatccatagccctcacgttcctcgcggttggaggagttctgctctttctctccgtgaacgtgcatgctgacattggatgtggcattgattttgacaggaagacctacacgtgtggaagcggtctattcgtgtggaagggtttgggaaaatacccaacggccgaccattctgttgagtttgcctcatatgattttctatcagcgtacctccaggagcagtttaagtctgagaagaaggtttgtattatttgtgaagacattgtccagtgtgaggcagctagaaaagcagccgctgcggtgtataaaaacctaggccacccgtttgtctacgtgaacacgtcggactcctatggaaaagtatttgccgaaatcccgaaaagagtccacactgttagtgtgggagtcgacgttgtggaaatggccatgatgactagggagaacaaaccggttggaccgtttggtgacttaccgcgtagtatggtttcgtggaagagtatccctgaaacagaagagcacccagtgttgagagtgttgacatcttcaagtgattaccagaaggtatgtggaaaagcgattggattccagtatgattttgttggataccgtcggaccatgtatggatctaatgtccagttaaaaatatcaaagaaggtttcgattgaatgtcccacatacttggcaggagtcgccgtgaaaaatgatagaacggttttcactgatggaatgttctggatgtcatcgaaacgtgagaatggaacatacgcgatcactgagttagagatggagcagtcccacaagtgcatctggccagaccaatacactcctgacgccactttgacgccacgtgacaatgaaatgtttgttccgcctgagtggggagggccaatgtcgaaagccaaccacattcctggttacaaaatgcagactggatttccatggaacaaagcccccattcggtttgttgagggaagtgttccaggaaccattgtcacacagattagccactgtgatggtagagggattgcagccgaagtgaatccagcaacgcagcccaattggtgctgtaagtcctgtacaaggattttccactttgaagtcgatgggaaactctattatccaatggagattcggcccgacccgaaaggaggggaacagcaaaaagttcctgtagtggagacacccattggagatgaagaaaccgagactgttggtggatggctgggtagaatgtataacattccaggagctgagggatcatatgcggattttcgactccccaagttgccaaattcaagaccaagcgcaatggtggggagtttggtcaatctattatgcttgatgttttcaattcagatagttaccaagactatgcgggcaagaacgcttatgcgtttctatctttgttgcttggtttttatgttctttggaatgccaactttgtttggattaagtgggtttttggcgtggatgatgattctaccaatctcacacaactcggtaacaatgtgcaacctaaccgtgcatctgtgggctgtactgctaaaccagagctcggcgatgtttctgtggggcctaacgctccgatcccagatacagaggtctaccgctggacagatgctactctttaccatgcagatgttgcatcacgccatctacgcgcactcttgggtgttcgggtgggtcatcgaagtatgcttgtcagtcgggcttatgatgaacttgttaaccgtcatcgatacggttcacccgaaactgatcgcatacttgctcttcttcggatggaaaacgggcatgtgcgtagtgtgcgcttggttattgatatactcaatcaggagatggaactctatagtcgccgcggctccggccgcgggcgggtggaggtcagggtatcgaacaatgatgtcctccagtttgattgttatctttatcagtgtaggaattgcaggagttatcgcttcggactatggaggttatccggctgcggctgcggtgactgcagcattgttgataatgggaatcaaaatgtttgactttctgacgacccgattgtctcttgagttcgtatctgcaggcatgttccccgaaggtgttgaaaaagcctttgaaccggactcggtcagtgacttgtttagggcatctttcactgtagatgggataaagttgcaggaccatgttgaaccgatccccattttgtttgccattttgtacatctttattggagctgtggcctgtaaggttaacccggccctcggaatagtgtatgctatcgccatgttcgcgactcctttaccggagttaatgcgtttatacatgatgaccatctattcctctacatttcggacagacactctgcttgggatggctatcccagaaacggagccagaactgtctcaagactttgggccaatccctgatgggatttatcgggtgaacaatcatggattttcagtgaagagtcatcggggagttggaatcgtaaagaatggggtttttcacactctcatgcatgtcacgctcaatgagccactcgcgtggcaaaatcgcctagtaggaccttcaatgggccactctctcaaggactatgtcacatacggtggaaactggcaattgcctgactttgatattgttaatgaggtgggcataatggtttgtggacgggatcgttccattcagtacaaaagacacgaggttgggacaatcatgatcgacgacaagcgagtgatgtacttcactcatgattacgggcacggatcatctggttcaccaatttttgtgaacggagaacctgtggccttatacggcttcgggttccatttgtacaataggtatcgatcaatagttctgcctatcccacgtgaagaagtccttgatggggctagtaatgagggcataccagctgagcacggaaccatgcgcaacaagttttttgttgactggcatccaggaaaagggaaaacccgaaaagtgatcgttaaagaggtgttaaatgctttgaatttagcacggcggattgttgttctggcccctacacgagttgtcctggctgaaataactaaggcaataggggaaaacacatcaaaaacgccctcaaaaaatcttgctttcaccggtcacaatattgtgacggtggcttgccacgcgacgttcactgattatgttttgcgtcatgggttatcaaaattcaaagctcacgaagtcataatggatgagtgccattttctggacccacgatctatagctgcgagaggaatcctggagcatctggcaactaaacgtggagttaaagtcacgtttatgagtgcaacgatcccaggacgtgaaccttcactcgggtcgaattttgagatctctgaacaggccttgcagtttccccgtgacgtcaaccaaaggtggatagaaactgttgctaggggaaagaccgttgccttcgtgccatctcacagggtaggtgacaagctagctcgcgggtgtccccaagccatttccctgcataggaacaattttgacaccaattacagcacagctatggatgagtccataaaatttatctacaccactgacatatcggaaatgggagccaatttcagtgctgacaccgtcatagatttccgggtggcgattaagccaaagatttctagtgaatttgccgtcactcttgaaccaactccgatcacgcgatcatcgatgattcaacggcgtggtcgagttggaagacaacgacctggaacctatatttacccagttgacaaaggcgtcgaagatgcctccgatcagttggcttgttggacagaagctcagatgttgttggatcaattggacttgacaatgatggcagaggaagttcggcagtcaaacattccaggggcttacaaattagttgggcgtagcctagacatatttcggaagttgctggagaaggatgacataccaatctggctgagctggaagtgggccgacagtgttcaacaacaatactccatattgtttgaaggagaacgtcaagagaatgtcgctcgtgtcgtcaacactcgagactatgcttctctagagtataagccgaagtttgttgatgcacgattcgagcgtcttggatgggatcaacgaaagctgtcaattcagttttacatgaacactcggagcttcataactttcgccactttgtcacacgtcatttctcaagtgatcgaagctggagttgtcaattctgcttggaagcgaataggagacgttagcatcatctttactgaaggaggcgacccacatgctaaagatgaaactatcatggcttggactattctggttggaggagtgttgggggctcttggattcctcatagttgcatggggaatgaaggctgtcttgcgagtaattttcggatcccgcgataagcatcttagcgtcccaaccttagtggcggatttccaaccatacatagtgtgtatagttcccattgccctacatcttgctggggttcctataccaatgacaattgtgtttttcgcgatgcttttcttgacttatccactaatgtacaagagtgccggacaacggagttatgttgacattgacttggtgaaatggattctgttaggtggatgtattgtaactggagtcatttgctgggaaatgagattgctcccaaacatctcatcagacatttcagctattttgaataggcaaagacaaagggaagacaccccaacttttgatgcttcaccaccttgggaatggttggatttagcacagccagtccctcacaatgttgaattgacgtcagtggtgataactacattcacgacctggctgttcttgcaccaaattgtcggatggtcatacgagtcagagtggctgaaatcctatttcgaccacaaaggagtgggtcagatcatgggtggttttcggttggacacaatttcatggggatcagctctaagcggtcttctgggcacagctacttatgcctcatggggagccattttgactgggttaggaggagcggttgtgtattttttcctgatggtttcaatgctcaagtggaacttttcgggaggagccacaactggcttagaaaacaatgtcatgcgaaacgaccgagaaactggactaggtaatcggccggcaaacgacaataggcgttccctcctgtacggtgtggtggcggctgaatgtcttgtgtggttgttctgtttcagaactgccacggatgccatagtggtggcttgtttagtgtcctattgtttatggatcatcaacaacccggctagccctcaccacaaaaacactgacttaggatcggcgtgtagtttcatcggtcttttgtactgtacatgtcctactcaaaaatgcatccaagtattgatgaggtttgctttggccaggttgaacatgaacacccgctctctggaaaaaagcgcgacgggaggccttggacaccgttggaagaagctattaaatgcgatgacactattggaattcaacgcttaccgatcttgtggagttgacgagactgagaagggtgactatgtgtcacgaggagggctgaagctgagagagataaccatgaagtatggttggaagccagaagggatatgtgttgatcttggatgcggcagaggaggatggtcacagcacttggctatggatccccgcgtaactagagtggaatcattcacgttaggaggaacagcacgagaaaatccccagccaatcaagacacttggtcataaccttatccggttcaagagtggagtcaatgtgtataatatgacgccaacacatgctaacaccatagtgtgtgatatcggagaaagtgaccccaaaccagaggtggaaacctctagaacattgcgggtcctcaaaacacttgaactatggttggccaggaatccaaacgctgaatttgtgtgcaaagtcctttgcccataccccgtggaagtcctcaaatgtctggaaacccttcaacataagtatggcggaagaattattaggtcgacgtatagccgaaattcaagtgctgaaatgtattacatttctggaggccgtaacaacatggtgaaggttatcttcaccaccctccactccttgatttcgaggatacgaactaggccggagaaaatcgtcaaagaaagtgtttctctaccagttgggactagaagcgatccagggcacaagatcaagagtatggatccaaagatgatagcaacgcgggtggaaaagataaaaaaggaacatgcggacacgtggttcgttgacaacaaccatccataccaatcatttcggtatgtgggatcgtacgtcacagatgatgtgacaccaggaggtcagactgtcaacccattaatgagaaaaatgatgtggccgtgggagactgttggaggagttgtaaatttcatgatgacggacgtgtccacatatgcccaacagaaggtgttgcgagagaaggtcgacacactatcccctgaacctccaaacgacattcaaagggttaacagatggatcaccgagttcttgtgtgcttcattcatgcgtcgagggttgaaacctagaatcctgaccatggagcaatatatcaacaacgtaaagagctcagctgccattggatcgtggagcagtgatgtcccgtggagcagtgtccgagaagctttagctgataaaagattccaccaaatggtcgaggaggaaaggaaactccacttagcaggagactgccgcatgtgcgtgtacaacaccatgggcaagaaggagaagaaaccttcagccatgggcgtggccaagggctctcgaaccatttggtacatgtggttaggttcacggtttttggagtacgaagcccttggcttcttaaatgaagatcattgggtgtcacgagacaacttggcatgtggtgttggtggagtgggagtgaattacttcggctactacctacaagaaattgcacggaaagggaagttttttatcgccgatgacatagcgggatgggacacgcggatcaatgagagtgacttggccgatgaggaatttctcatcatgtccctcatttgtgacccataccatcgatcacttgcaaaagccgtgtttcggtttgcctaccagaacattgtggccttgtttccgcgaaatcatcctgggtttggaagtggaacggtgatggatgtcgtggccagaactgaccaacgaggttcaggacaggtcgtgacttacgctctaaacacgataacgaacgccaagattcaattaggcagaatgctggaagccgaaggattactagacgctcatgaacatgtaatcaaaaaatggttaaacgacaatggtgaagaggctctctccgggatggtggtggccggggatgatgttgtagttgcgaccaacaacggaaatttttcaaggtccttacgatacctccatttgaacgggaaaattcgtaaagacattgatccgtccctaccgtccaaagttgaaacgaactgggaggtggttgaattttgttctcaccattaccacgtgatgaccttaaaggacggacgacgaataattgtcccatgccgagagcagaatgaaatcattggacgaggcaggattcaaaaaggagggttggtgacccttgccgaaagtgcctgcctagcgaaggcttatgggcaaatgtgggctttgtatttctttcaccgaagagatctgcggatggcttttctagccataacttcgagtgttccaatagactggttcccagagggccggacctcgtggtcgattcaccaaaataaagagtggatgaccactgaggacatgttgcgggtctggaatacagtgtggatccaggacaatccctggatggaggacaaaatggaaatcgaaaattggagggacattccgtacctcccgaaatccatggacctaaagtgcggcagtctcattggaacaaaagaaagagccgcttggtcaaaggatctgccgtcaacggtcacggcagttcggaaaattatcgaccaagacacgaaaaccgagaatgtctaccaagactttcttggcggaatgggccggttccaaacgtacactgaccccatggcaacgtaagaaaccatcttttccaaattagtcgaaaaattttgcccctcttcgaggggctttggcggcagcaggagattttctccggggtttcacgctccccccgatgccagtggtcacagcccaagtcagagacttggagttgtggcgggacagtgagctctgtcagtggtcaatagctcaataaatatggcagcagagcttgtctcggggattcacgctccccccattgtgagtgtgtcgaactggtttcgaaggacgtctagaacgacgctaaagttcaaatccggcaacagagagtttatgtctcggggcctcacgcaccccccgttgtgagtgaagtcctttctggccatttagtggtcaggaagggtaccgttttggaacgacggaaataagttccatggagcgacactagccccactgaggggcggttggaatgacacccaacccgctatagtgcgtcgacaggtcaattagctacctggaataagctaatgtgcagggcaacaaagttctaacgaactagggtgagtagcgtcaccccccggttgtgaaaacgattgcgactagaactaaagtcgagagtctccccaccgataggggagctcgtcagtttgttttagtccaattacgct

SEQ ID NO: 386 - DNA, 10745 bp, Lilly Creek virus
tacgtagaagtataacacgttgaagtaaagttttgaatcaagagataaatcatggttacaaaactcaggaggcccgcaaggcgggctgtcgatatgattaggcgtgcggtaccccgcgccgcaggaccacgtaaggtcctaactagggtatcaaacaccatgaagcgcaatgctggggcattgagagctctcttggcctatcttcttttccagacatttgctggaagaaaggtaggcactagagcccgcaccgcactcaagcgcttcaataaaaatgacatcgtgaaaatgctgctggctttccgaagaacattgacgaacataatcaccaccatgcaacgccgcgtgaaagggaaaaaccgaaggggattgcaggaagtgtcattggtcgttacagcgctaatggttgtaggagtcttctctgccacgctaaagactgtgggagaatattcatggctcaacgttacaagcaatgatgtaggaaaatggatccgagtggaaaacagaaatggacgtggagagtgctttgtgacagccactgatgttggaacatggtgtccagactcagttggctacgagtgccctcaggtagctcctgcttatgatccggaagacttagactgttactgtcggaatacatccacttacgtcacgtatgggagatgtaagaatggaaaaaatggccgatcacgtagcaaacgctctgtgaccataacgccacatggagaagctggcctgcgcgttggaagcactaaacactggacatcccgagcttcgcctgaacgctacctaatgagagtcgaaaagtgggtgctgaggcatcccctaccggcgtttgtgctggtgatcctaggatggatgatgggaagaactcatgggcaacggatcatgtacatactgctaatgcttctcgtggccccatcctatggcaaccaatgcttggacgtgcaatctcgggactttgtccagggtgtcagtggagggacatgggttgacgtggttctagaccatgataattgcatcactattgttgcggatggcaagccatcatttgacatccggctgaccaaaatgacgatgacaaagtttgctgattacaaacgatactgccttcaggcgacgatgacagatgtcaccagcatagtggcatgcccaggagcaggagacgcccacaatgacaaaagtaaaaaccatgactacatctgcaaggccgtcaccaatgaccgtggatggggaaatggatgtgtgttattcggaaaaggatcaatggaaacgtgtgggaaattcgaatgtaagaagaaaatggccggtaagttggtggctcgtgagaacgtggaatccgtggtcacagtacacgtgcacggagcgtcagcaactgacaccaagggagtggacactgcttcgacagccacggcgacaataacgcctaaatcctcaactgccagtgtgaaccttaatgactttggcagtgttgaggtggactgttcaacagatgtcggaatggactttggtgaagtggtggtagctgacatggctggaaagtggtggatcgtgaacaaagactggttcaatgaactggctttgccatggtcgacggccagcgtagcagcagaagtctggcaaggacgcgatcggttaatagagttcggatggccacatgcagtaaagcaaaacatatatgacatcggagaccaagaaggagctgtaaccgcagccatagcgcaagcgcccatggcaaaatgggagtctgacaaagttgagcttgcttctggaatcttgaaatgcaaagttaaactgggaaacctcaagctcagaggaatcacatatggtatgtgtactaagagtttcaacatggaaactcgtccagctgacactgggcatggtaccgtagccttcaaattgaaatacactggaagtgatgttccatgtcgtgtgccactgaatgtgattgacagtgacggaggagtagcggctggaagaattatcacagcccaccctttcgttatgaagcaaaacgattacattatcatagaagtggaaccaccattcggtgacagcaagatagaaattggaactggaacgaccaagttgaccgaagcatggcatcgaaaagggagttctattggcaatgctttttcagctacgtataaaggcatcaccaagttgactgtgctcggggagcatgcttgggatttcaactccttgggaggcttcggagccagcctgggaaaagcggtgcataccctcttcggaggagtgtttagggtgctctttggaggcatgggatggctgacgaagatcctggtcggagccattctagtgtggctggggctgggcgcccatgacaagaccatagccactacgatgatagttgtgggctccatgttgatgtatttggcagtgtcagtgggggctctgtcagagattgggtgcagtctggacatcgctagaagagaaatgaaatgtggcgatggagttttcatttttagggaagctgggatgtggaaagaaggttacgcgttccatcctgcagaacctaagacgttggctgcctcagtcctcaagagttggaaagctggggtttgtggagtacgctccacaagccgcatggagcacgcgatgtggaaacagattgagaatgagctgaatggcatacttgaagaaaatgaagctcatttgagtgtagtggtcaaggaaaccaacggcaccttcccccgtggagatcgcagaatgcaagtggcggagcctctgaagtatgggtggaagacctgggggaagaccgctgtgtctactgttcccctggccaaggaaactttcatcgttgatggcagtgatgaaggagaatgcccttcccaactccgagcgtggaactcattccaagttgaagaatttggaacaggcctcctcaaaactaaagtcttccttgatatctcaacagccgtgactgtccagtgtgacaccaaactgcttggagcggccatcaagggaaacaaatctgtacatggagatcctggtttgtggatggtgtctgctgagatagatggtgtctggcagataactgaattgaccctagctgaaagtcgaagatgtatgtggccagactcgcacactgtatggggccggaatgttttggagagcgaactcattcttcctcctacgtacgggggaccagtgacaaacatgaacaagcgtagaggatacgccacccaagtcagtggaccttggaatcatgtgcccctgaaggtggtcttcgaggaatgtcctggaaccaccgtgacgattgaacctaactgcaccaagcgatcagaatcagtccggtccactacggatagtggaaagataatatctgactggtgctgtcgttcgtgcactatgccgcccctgacataccgcacccctgacggatgttggtatgctatggaggttcgaccgaagaatgtcaaagaggagagcttaattcgatcacatgtggcagcaggagtattcaaaggaatagatgatgtctcactgggattgctcgtcatgataatattcctgcaggaaggcttgcgaagaaagttgacgaccacatatataatgtgggctgccttggtagtgttgacagcaggaattttgggagagctctctctaagagacgtgctgcggtacctcattctggtaggcacagctttctctgaggccaataatggtggagacctaatacatctggctctcgtggccgttttcaaaatcagaccggctttcttgtttggattcttattccgtgcgaagtggtcacccagagagggagtgcttttagcttcaggagcattaatgctgcaaatagccagtgaatgcctgtacgcaacagccatcatgcaagtcgtggatgcattgagcatggggtggctcatgatccgtgccattgctatcccaggaatgacgtcaaaggccatgcctctgttatgtgcatgtatccctgctgtcacatccctgctagtgcattccacacgagttggagttatcaccttggctggcatgtctttgattgcgggcaacaaaggctcatctgtcaaaaaacatggtccgtatttggtagcactaataaccactgcgatgggagcaagtccggttggaatgctggccatggaggcgttttcccacttaaagtctaggagatcttggccagctggtgaaatgatgtcagctgtgggactgacatgcgcacttgttggagccataagtggtacgtcatcacatgactttgctgggcccctggctgcagcagccctcatcatcatagcatatgcgataagtggaaggtcagctgatgtatacctagaaaaagctggagagatctcttggagtgaggatgccaagatatctggatcaagtccacgcatagatgtatgcgtgaccgagaacggggatttcaaactgcggcatgaaggggaagcaacttggactcgcaactgcattctagctgcctgcttaatagtggctggagtgcatccgttgggcattccagtggctggattgatgtggttcggatatgtaaaagctaacaggagaggcacggtgctgtgggacattccgtcaccacagacaaatgcagctccaactgtagaagatggatgttaccgtgtaatgtcgaagagactcctggggagcacccagcttggagtagggatcatgttggattcaacattccacaccatgtggcacatcactcgaggggcttccatagtcagtggagaaggacgcctagatccgtactgggctgatgtaaaagaagacctggtgtgctatggaggaccatggaagatccgtaacatgtgggacggcatgtctgaagttcaattgatcgcggtgccaccgaaggaaaaccctgtcaatgtgcaaaccatgcccggcaaattcgtggttgccaatggaggtgagataggagctgttgttcttgactaccctcctggaacttctggatcccctatagttgatcaacaagggaacgtcattggactgtatggaaatggagtcatgatcaatgatcagacgtatgccagcgcgatagcacaagctccggttgaggcagcgcgaacccccacctggtttagtgaggacatgttacgcaaaggccaaatccatgttctggacttacaccctggagcaggaaaaacacgcaaagtgctccctgaaattctaaaggcagctgtggaaaaacggttaaaaaccctggtcctggcccctacgcgggtggtggccaaggaaatgcatgaggctctaacgggactccctgttagataccagacatcggccataccaccaacatcgtctgggggtgaactgatagatgtaatgtgtcatgccacatacacacacagacaactaacccctgggagaggcattaactatcagctctatatcgtggatgaggcacatttcacggatccggcatcaatagcagctagaggaataatagcaactagagtgcgcctggggcatgccgctgcaatttttatgacagcaacaccccctggaatgtccaacccctttccggagtctaatgcacacatagaggacgaggaacgggaggtgcccacaaaggcttggaactccggatatgaatggatcacagactacagtgggcgaacggtgtggttcgtgccatcaatacgcatggctaacaccattgcctcatgtttagtgcgagccggcaaggtggtgatcgtcctccatagtggatcatttaatgaggagtatcagaaaacaaagtctggcaactgggactttgtggtcactactgacatatcagagatgggagccaatttcaaagcctctcgagtcattgactctcggctttctataaaacccatgttctcttatgcccctagtgagcgcgttgttataggtatgcccaggccagtgtctccagctagtgcagctcagcgccgcggacgggtcgggagggaccctagacaacttggagaccagtacatatatggaggtcccatcggagaggactcagcagaatacgtccattggactgaggcgaggatcctgatggacaatgtcaccgttccaggtggtctgtacccacagttctatgaacctgaaagtggaatgtgcaacgccatggatggggcccaccgattgacagacaccaaacgagaggtgtttcgagaccttatgaaaaaaggagagctaccggtatggcttgcgtaccaggtggctcaagctggacacgcgtacacagacagaacatggtgctatagtggaccagctgaccatcaggtgtacgacgactgtgggcaaactgtggattacagatcactgaatggggagcgacgcatgctcagaccaaaatggctagaccagcggacgtacaatgataagacctctttgaggctttttactgagttcgcggagggtcgtagacggtattcagagcttattgatgtgttcggccgcatgcctcaacacatgctggacaaaactatattagccgcagatacattcaaggatgtgctcacagccactcctggatcccgtgttcatcgcttggcgctggacaacttgcctgaagccacggaaacgataatggtactgggaatattgagtgtgtcgacgctgggagttatcttgttcctcatgtccccaaaaggaatgactcgcatgacatgtgggttggtggttattatactggccacttatttcttgtgggtatcagggatggcaggttatcaaatagcggctgttcagctcatggcctttgtgctgtttgtggtactggttccagaaccaggatcacaacggtcggtacaggacaacacgattgctatcatcttgatagtcatcttgtctttggcagccgcaatagcggctaatgaagctggactattagaaaagaccaagaaagatttcacgtggagaaaggagaaaccgacacaactggagacaagtccctggaacatagacttttccatggacctccggccagctactagttggtcactgtacgtagtgatggcaaccatgctgggaccagtgctcgagcatgcgattgtgactaactatgcgagtgtttctctcacagcaattaccaatcaggccggaatcctcctgtccatggataagggaactccgttttggaatctggactggagtgtcgtgttgttgtgtgttggcagctggtcaggaataaatggaactaccctcatggtggcatcggtcatgactgtgctacattttgcgatgattcttccgggaattcgcgcaaaagcagctagagaagctcagaatagaacagccgctggagtgtctaagaaccccctggtggacgggatgaacaccatcaacatccagccgctaccggagctagaccccatgtacgagaggaaaatgggtctgtggatgctcattgcagttgctggagcagcggtagtcttcgacaagaggatgctgcactatactgaattcggagtactaggttctgcagccattacccctctagttgaggggtatgcatctgcagtctggaacacctccgtggctgctagtgtgtgcaacttaatgaggggacattacatggccggagttccaatggcatattctttgatcaggaatttgtcaatgaaaggagtgtctagaagaggaattcaggctacacgcacacttggcatggtttggaaacacaagctcaacaccatggacaaagccatgttcaatgcatacaaaaaggacggaatcactgaagttgacagggagccagctcgagcggctatgaaaaaaggagatctagtaagtgggtgggctgtctcgagaggatcagcaaaactcagatggatgcacgaacggggattcatcccactgcaaggaacagtggttgacctcgggtgcggaagaggcggatggagctactacgcagccgcacagcgaaaagtgacgtctgtcaaggggctaaccaagggaggccctggacacgaggaacccgttaacgtccagtcttatgggtggaatctaatctcgtttcggagtggagtagatgtcttccacactgatgtgcaaccagcagacacactgctgtgcgacataggtgaatcgtcatctgatcccaatttagaaaagacacgcacacttcaagttctggttaattttgagaggtggcttaaggagtcaaaatgcgaaaatttctgttgcaaagttctcggaccttacttaccagaggtcatggaacggcttgaccgactcacaaaaacttatggtggagccgtcatccgaaatcctctctccaggaattcgacacatgagatgtattgggtctcgggcgctaagggcaatcctgtcaatgcgatcacaactacttcccgagtgctgctggagcgcatgtgtaggcgggtagggaaaagttactgggaagaggacgtcaatcttggaactggaacccgagcagtaacctgctcagctgaaacaccagacatgtcgaagataggaagacgcattgagttgctcaagaaggagtacagggcgtcctggtttgaggatcctgaacacccctacaagacttggacataccatgggtcatatgaaaccaagaccactgggagctcgtctagtatgatcaatggagtggtgaaggagatgactcacccatgggacacaaatccaagagtgactacagtgtgtatgactgacaccacaccttttggacagcaacgtgtgtttaaagagaaagtagacaccaaggcgcgtgaaccatccgatggcactagagaagtcatgaggattgtcagcaaatggctcacgatgtacattggccggaccaaaaagccccgcatttgcacagcggaagagttcatcgcgaaggtaaactccgatgctgcacttgggacgatgtttgactcccaaggaacgtgggcgaacgccagagaggcagttcaagacccaaggttctggcagatggtggcacgtgagagggaactccacttgcgtggacaatgcgccacctgtgtctacaacatgatgggaaaaagagaaaagaaaatgacagagtttggcaaatcaaaaggtagccgagccatctggttcatgtggctaggagcccgctttttggaatttgagagtctgggtttcctaaatgaagaccattggttgtcgcgagaaaactcaggaggtggtgttgaggggataggtctgcaatacctgggttatgttctgcgggacatggctgcaattccgggggggcggatgtacgctgatgacaccgctggctgggatacacgcatcaccaatgctgacttggaagacgaaatggacatattggatctaatggatccccaccacaaaaagttagctaggaacctcatggacttggcttacaacaataaggttgtgagagtcatgcgccctggtaaaggaggcaagactctgatggacatcatcagtcgcaaggatcaacgcgggagtggtcaggttgtgacataccctttgaacacctggaccaacttgaaggtgcagctcatccgcatggcagaggctgaaggggtgcttgacccgcgtgaagtagagggcatcacacacacaacgaaaaacagtctcgagaagtggctcacaaaccacggagctgagcggctgaaacgcgttgcagccagtggagacgatgtcgttgttaaacccattgacgagcggtttgcgtccgctctcacataccttaatgacatggcgaaaactagaaaggacatctgcgaatggaaaccatcaactggctggtaccactgggaggaagtgcctttctgctctcaccacttccaccagctcatgttgaaagatggtagaactcttgttgtgccgtgtcgggaccaggatgagctgattggtagagcacgtgtgtcccctggagctggatggaccattaaggaaacagctggtcttagcaaggcttacgcgcaaatgtggctgttaatgcacttccaccggagggatcttagaatggctgggtttgcaatatgcagtgcggtgccagccgcatgggtccctacaggacggacatcgtggtctctgcatgccaaaggcgaatggatgaccacagaagacatgcttgaggtctggaaccgtgtgtggatagaggacaatccacacatggccaacaaaacccgcataggatcttggcaggatatcccataccaacgcaaatccctggatatacattgtggctcaatgataggacaacgctccagatctacatgggctgcaaatatacgcataagcatcaatcacgtgcgcaggttgattgggagcaatgaaaagtacctggattacatgcaagagcaagagagattcaggcaaccaacaccaactcggcttggtaacgtgatctaaaaccctacaaaatttcaaaaacatgaccgagtcaggcctctacggagccagcattaatgagagtaagtgctgctgcctgtgtctctccagaacaccttacgcgccaaatgtgttctgacactataccagcgcaaaactaggccccacaagggatagggtaatggttgtgaacccctagcgtctaaatcaacctcatagtggaatggcgcccgaccactataaaacatggcactaatagaagggcaatgggtagctcgacccattaagtaaacaccctattaatatcgagcatcatatcgacacctgggaaagaccggagatacctcttgcttcacagcgctcaatccacaaggcacagtacgccgaagaattgtggattgggaattgagaaa

SEQ ID NO: 387 - protein, 3433 aa, Autographa californica nucleopolyhedrovirus
MVTKLRRPARRAVDMIRRAVPRAAGPRKVLTRVSNTMKRNAGALRALLAYLLFQTFAGRKVGTRARTALKRFNKNDIVKMLLAFRRTLTNIITTMQRRVKGKNRRGLQEVSLVVTALMVVGVFSATLKTVGEYSWLNVTSNDVGKWIRVENRNGRGECFVTATDVGTWCPDSVGYECPQVAPAYDPEDLDCYCRNTSTYVTYGRCKNGKNGRSRSKRSVTITPHGEAGLRVGSTKHWTSRASPERYLMRVEKWVLRHPLPAFVLVILGWMMGRTHGQRIMYILLMLLVAPSYGNQCLDVQSRDFVQGVSGGTWVDVVLDHDNCITIVADGKPSFDIRLTKMTMTKFADYKRYCLQATMTDVTSIVACPGAGDAHNDKSKNHDYICKAVTNDRGWGNGCVLFGKGSMETCGKFECKKKMAGKLVARENVESVVTVHVHGASATDTKGVDTASTATATITPKSSTASVNLNDFGSVEVDCSTDVGMDFGEVVVADMAGKWWIVNKDWFNELALPWSTASVAAEVWQGRDRLIEFGWPHAVKQNIYDIGDQEGAVTAAIAQAPMAKWESDKVELASGILKCKVKLGNLKLRGITYGMCTKSFNMETRPADTGHGTVAFKLKYTGSDVPCRVPLNVIDSDGGVAAGRIITAHPFVMKQNDYIIIEVEPPFGDSKIEIGTGTTKLTEAWHRKGSSIGNAFSATYKGITKLTVLGEHAWDFNSLGGFGASLGKAVHTLFGGVFRVLFGGMGWLTKILVGAILVWLGLGAHDKTIATTMIVVGSMLMYLAVSVGALSEIGCSLDIARREMKCGDGVFIFREAGMWKEGYAFHPAEPKTLAASVLKSWKAGVCGVRSTSRMEHAMWKQIENELNGILEENEAHLSVVVKETNGTFPRGDRRMQVAEPLKYGWKTWGKTAVSTVPLAKETFIVDGSDEGECPSQLRAWNSFQVEEFGTGLLKTKVFLDISTAVTVQCDTKLLGAAIKGNKSVHGDPGLWMVSAEIDGVWQITELTLAESRRCMWPDSHTVWGRNVLESELILPPTYGGPVTNMNKRRGYATQVSGPWNHVPLKVVFEECPGTTVTIEPNCTKRSESVRSTTDSGKIISDWCCRSCTMPPLTYRTPDGCWYAMEVRPKNVKEESLIRSHVAAGVFKGIDDVSLGLLVMIIFLQEGLRRKLTTTYIMWAALVVLTAGILGELSLRDVLRYLILVGTAFSEANNGGDLIHLALVAVFKIRPAFLFGFLFRAKWSPREGVLLASGALMLQIASECLYATAIMQVVDALSMGWLMIRAIAIPGMTSKAMPLLCACIPAVTSLLVHSTRVGVITLAGMSLIAGNKGSSVKKHGPYLVALITTAMGASPVGMLAMEAFSHLKSRRSWPAGEMMSAVGLTCALVGAISGTSSHDFAGPLAAAALIIIAYAISGRSADVYLEKAGEISWSEDAKISGSSPRIDVCVTENGDFKLRHEGEATWTRNCILAACLIVAGVHPLGIPVAGLMWFGYVKANRRGTVLWDIPSPQTNAAPTVEDGCYRVMSKRLLGSTQLGVGIMLDSTFHTMWHITRGASIVSGEGRLDPYWADVKEDLVCYGGPWKIRNMWDGMSEVQLIAVPPKENPVNVQTMPGKFVVANGGEIGAVVLDYPPGTSGSPIVDQQGNVIGLYGNGVMINDQTYASAIAQAPVEAARTPTWFSEDMLRKGQIHVLDLHPGAGKTRKVLPEILKAAVEKRLKTLVLAPTRVVAKEMHEALTGLPVRYQTSAIPPTSSGGELIDVMCHATYTHRQLTPGRGINYQLYIVDEAHFTDPASIAARGIIATRVRLGHAAAIFMTATPPGMSNPFPESNAHIEDEEREVPTKAWNSGYEWITDYSGRTVWFVPSIRMANTIASCLVRAGKVVIVLHSGSFNEEYQKTKSGNWDFVVTTDISEMGANFKASRVIDSRLSIKPMFSYAPSERVVIGMPRPVSPASAAQRRGRVGRDPRQLGDQYIYGGPIGEDSAEYVHWTEARILMDNVTVPGGLYPQFYEPESGMCNAMDGAHRLTDTKREVFRDLMKKGELPVWLAYQVAQAGHAYTDRTWCYSGPADHQVYDDCGQTVDYRSLNGERRMLRPKWLDQRTYNDKTSLRLFTEFAEGRRRYSELIDVFGRMPQHMLDKTILAADTFKDVLTATPGSRVHRLALDNLPEATETIMVLGILSVSTLGVILFLMSPKGMTRMTCGLVVIILATYFLWVSGMAGYQIAAVQLMAFVLFVVLVPEPGSQRSVQDNTIAIILIVILSLAAAIAANEAGLLEKTKKDFTWRKEKPTQLETSPWNIDFSMDLRPATSWSLYVVMATMLGPVLEHAIVTNYASVSLTAITNQAGILLSMDKGTPFWNLDWSVVLLCVGSWSGINGTTLMVASVMTVLHFAMILPGIRAKAAREAQNRTAAGVSKNPLVDGMNTINIQPLPELDPMYERKMGLWMLIAVAGAAVVFDKRMLHYTEFGVLGSAAITPLVEGYASAVWNTSVAASVCNLMRGHYMAGVPMAYSLIRNLSMKGVSRRGIQATRTLGMVWKHKLNTMDKAMFNAYKKDGITEVDREPARAAMKKGDLVSGWAVSRGSAKLRWMHERGFIPLQGTVVDLGCGRGGWSYYAAAQRKVTSVKGLTKGGPGHEEPVNVQSYGWNLISFRSGVDVFHTDVQPADTLLCDIGESSSDPNLEKTRTLQVLVNFERWLKESKCENFCCKVLGPYLPEVMERLDRLTKTYGGAVIRNPLSRNSTHEMYWVSGAKGNPVNAITTTSRVLLERMCRRVGKSYWEEDVNLGTGTRAVTCSAETPDMSKIGRRIELLKKEYRASWFEDPEHPYKTWTYHGSYETKTTGSSSSMINGVVKEMTHPWDTNPRVTTVCMTDTTPFGQQRVFKEKVDTKAREPSDGTREVMRIVSKWLTMYIGRTKKPRICTAEEFIAKVNSDAALGTMFDSQGTWANAREAVQDPRFWQMVARERELHLRGQCATCVYNMMGKREKKMTEFGKSKGSRAIWFMWLGARFLEFESLGFLNEDHWLSRENSGGGVEGIGLQYLGYVLRDMAAIPGGRMYADDTAGWDTRITNADLEDEMDILDLMDPHHKKLARNLMDLAYNNKVVRVMRPGKGGKTLMDIISRKDQRGSGQVVTYPLNTWTNLKVQLIRMAEAEGVLDPREVEGITHTTKNSLEKWLTNHGAERLKRVAASGDDVVVKPIDERFASALTYLNDMAKTRKDICEWKPSTGWYHWEEVPFCSHHFHQLMLKDGRTLVVPCRDQDELIGRARVSPGAGWTIKETAGLSKAYAQMWLLMHFHRRDLRMAGFAICSAVPAAWVPTGRTSWSLHAKGEWMTTEDMLEVWNRVWIEDNPHMANKTRIGSWQDIPYQRKSLDIHCGSMIGQRSRSTWAANIRISINHVRRLIGSNEKYLDYMQEQERFRQPTPTRLGNVI

SEQ ID NO: 388 - DNA, 11818 bp, Artificial Sequence
  Synthetic
ggatctacgaacgagaataagtagaagaacggaacgacagagtcaggcctcaaatgagccagcattaatgagagtaagtgctgctgcctgtgcctctccttaacacgtggtagcgccactcgtgtttcgttacctaatagcgctagagtcagacccaagtaggccagggctatggttgtaagccctgctgtctgtggcagccatccagtggtaatgcgtcgcaccactaaggattaatagacgtatattgggagggactggtgaggagcagcaagctcgagctgcatcacccactggtactatcggttagaggaaaccccctccaaaatgtagagcatcatatcgacacctgggaaagaccggagatacctcttgcttcacagcactcaatccacaaggcacagatcgccgaataattgtggattggggattgagaaacatcaagtatctgggtcggcatggcatctccacctcctcgcggtccgacctgggcatccgaaggaggacgtcgtccactcggatggctaagggagagccacttttctctcgattctctatcggaatctagggagctcggatccagacatgataagatacattgatgagtttggacaaaccacaactagaatgcagtgaaaaaaatgctttatttgtgaaatttgtgatgctattgctttatttgtaaccattataagctgcaataaacaagttaacaacaacaattgctcgagggggggcccggtaccttgaagctgtccctgatggtcgtcatctacctgcctggacagcatggcctgcaacgcgggcatcccgatgccgccggaagcgagaagaatcataatggggaaggccatccagcctcgcgtcggcgcttaaggatcatgatgataaacaatgtatggtgctaatgttgcttcaacaacaattctgttgaactgtgttttcatgtttgccaacaagcacctttatactcggtggcctccccaccaccaacttttttgcactgcaaaaaaacacgcttttgcacgcgggcccatacatagtacaaactctacgtttcgtagactattttacataaatagtctacaccgttgtatacgctccaaatacactaccacacattgaacctttttgcagtgcaaaaaagtacgtgtcggcagtcacgtaggccggccttatcgggtcgcgtcctgtcacgtacgaatcacattatcggaccggacgagtgttgtcttatcgtgacaggacgccagcttcctgtgttgctaaccgcagccggacgcaactccttatcggaacaggacgcgcctccatatcagccgcgcgttatctcatgcgcgtgaccggacacgaggcgcccgtcccgcttatcgcgcctataaatacagcccgcaacgatctggtaaacagtatattttgcgtgtgcgtttcaaaacacagattgtattgaaagtacgtaagagtataacacgttggaataaagttttggatcaagaggaaaatcatggttacaaaactcaggaggcccgttaaacgggccgtcgatatgatgaggcgcgcggtaccccgcgccgcaggaccccggcgggtcctaactagggtatcaaataccgtgaagcgtaacgcaggcgctcttagagctcttctggcttatctgctgtaccagacattctctgggcggaaagttggtagtggtgctcggagcgcccttaagcgcttcaacaaaaatgacattgtgaaaatgttgctggcgttcagacggacattgacaaacatcatcacaaccatgcagcgtcgtgtgaaaggaaagaaacgtcgtggcgttcaagatgtgccgctattggtcttgctgctcgttggagcaggagcgatggctgtcactctctccaactttcaagggaaggtgatgatgacggtgaacgctactgacgtcacagacattatcacgataccaacggccgctggaaagaacctgtgcattgtcagagctatggatgtggggcacatgtgtgatgatactatcacctatgaatgtccagtgttgtcggccggaaatgatccagaagacattgactgctggtgcacgaagttagcagtctacgttaggtatggaagatgcaccaagacacgacactcaagacgcagcagaaggtcactaacagtgcagacgcatggagagagcaccctatcgaacaaaaagggggcctggatggacagcaccaaggctacaaggtacttggtaaaaacagaatcatggatcttgagaaaccctggatatgccttggtggcagctgtcattggatggatgctcggaagcaacaccatgcagcgtgtcgtgtttgccgtgttactgcttttggtagctccagcttacagctttaactgtcttggaatgagcaacagagatttcctggagggagtgtccggagcaacatgggtggacttggtccttgaaggtgacagctgtgtgaccattatgtccaaggacaagcccaccatcgatgtgaagatgatgaacatggaggccgctaacttagcagaagtccgcagttattgctacttagccactgtcagtgaactctccaccaaggctgcgtgcccaaccatgggggaagcccataatgacaagcgggctgacccatcttttgtgtgcaaacaaggagtagtggatagaggttggggcaatgggtgcggactttttggtaaaggaagcatcgacacatgcgccaaatttgcctgttcaaccaaggcaacgggaaggactatcttaaaggagaacattaagtatgaggtggctatctttgtgcatggaccaactaccgtggaatcgcatgggaactacttcacgcaaaccggagctgctcaggctgggagatttagtatcacccccgcggcaccctcttacactcttaagctcggagagtatggagaagtaacagtggactgtgaaccacgctcagggatagacaccagtgcatactatgtgatgactgtcgggacaaagactttcttggtccaccgtgagtggtttatggacctcaacctcccctggagcagtgctgaaagtaatgtttggaggaacagagagacgctaatggagtttgaagaaccacacgctacgaagcaatctgtgatagcattgggctctcaagagggagccctgcatcaagctctggcaggagccattcctgtggaattttcaagcaacactgtcaagctgacgtcaggccacctgaagtgtagggtgaagatggaaaaattgcagctgaaggggacaacttatggcgtctgttcaaaggccttcagattccttgggactcccgcagacacgggccatggtactgtggtactggaactgcagtacacaggcacggatggaccctgcaagatacccatttcatcagtagcttcattgaatgacctaacgccagtgggcaggttagttaccgtcaacccctttgtctccgtgtcaacggccaatgctaaagtcctgattgagttggaaccaccctttggagattcgtacatagtggtgggaagaggagagcaacagatcaaccatcactggcacaagtctggaagtagcattggcaaagctttcacagccaccctcaagggagctcagagactagcagctctgggagacacagcttgggactttggatcggttggaggagtgtttacctccgtgggaaaggctgtccatcaagtatttggtggagcattccgctcattgtttggaggcatgtcttggataactcagggtctgctgggggccctcctattgtggatgggtattaacgctcgtgatagatccatagccctcacgttcctcgcggttggaggagttctgctctttctctccgtgaacgtgcatgctctatcggaaataggatgcagtctggacattagccgaaaagaaatgaagtgtggggacggagtcttcatcttcagagaggcaggcatgtggaaggatgggtatgcgttccacccttccgaacccaaatctctggccgcgtcagttctcaagagttggcagtctggagtgtgcggcgtgcgctccacgaacagaatggaacatgccatgtggaaacagattgaaaatgaattgaacggcattctagaagagaatgaggcgcaactcagcgtggttgtgcgagagtctaacgggaccttcccgagaggagagcgccgcatgcacgtggccgaacctctgcgctatggatggaagacctggggaaagaccgcaatttcgacggtgccgctcgctaaagaaacgtttgtggtagatggcaatgatgaaggagaatgtccctctcaaatgcgtgcttggaattccttccaagttgaagagttcggaactgggctggtgaaaaccaaagtgttcttggacatatccactgctctcaccgcccaatgtgacaccaaaatgctgggcgctgccataaaggggaataggtctgttcatggagatccaggtctctggatggtctcagctgaaatcgatgggacatggcagataatagagctcacattggcagagagcaggcgttgcacatggccagactctcacaccgtgtggggtaggaatgtccaggagagtgagttgatactgccaccgtctttcggaggaccgatgaccaacatgaacaagcgtaaaggctacgcgacccaagtgggaggaccatggaaccatgttccactacgagtagtttttgaagagtgtccgggaaccactgtatctgttgaaccaaactgcaccaggagatcggattcagtgcgatccacaactgatagcggcaagattataaccgactggtgttgtcgttcctgtacaatgcctcccctaacgtaccgaacccccgatggatgctggtatgcaatggaaatcaggcccaagaatgttaaagaggagagtctgatccgttcgcatgtggcggcaggtgtgtttaaaggcattgacgacgtgtcactggggctgttagtaatgataattttcctgcaggaaggtttgagaagaaagttaactgcaacgtatatcatgtgggctgctcttgtggtcctcattgcaggaatcctaggggaactcacagtgagggatgtgctcaggtatctcatcctagtcggcactgcattcgctgagagtaataatggaggagatttaatacatctggccctagtggcggtcttcaagattaggccggcattcttatttggattcttgttcaggagtcagtggtcccccagagaaggtgtgttgctggcatctggagcgctgatgctgcagattgcaagtgagtgcttgcacgcatcggcgattatgcaggttgtcgattccttgagcatggggtggttgatgatcagagccattgctgtacctggtatgacctcaaaagccatgccactgctgtgtgcctgcattcctgcagttacgagcctactggcccactcaaccagagccggtataatcaccatggccggcatgtcgcttattgcaggaagtaagggatcatcagttaaaaaacacagtccatacatgcttgccctcgtggtggcaggcctcggagcccgtcccataggaatgttggcgatggaagccttctctcacctgaagggccggagatcatggccggctggtgagatgatgtcagccgttgggctgacatgtgcgctagtgggagctatcagtggcgcatcatctcaggacttcgccggacctctagcagcagcggctctaattattattgcatatgccattagtggacgctcagctgatgtataccttgagaaagccggtgagatatcctggagtgaggacgctaaaatatccggatcaagcccgcgcattgatgtgtgcgttaccgaaaatggagatttcaaattgcgtcatgagagtgaagcaacctggacccggaattgtgtcttggctgcttgcttagtcgtagccggagtgcacccactggggattccagtagcagggttgatgtggtttggatatgtgaaatcaaacaagcgggggactgtgttgtgggacattccctcaccacaggcaacatcagctccaacggtggaagatggatgctaccgcgttatgtcacgtagactgcttggcagcactcagcttggtgttgggatcatgctagactctacatttcacacaatgtggcacataacccgaggagcatctattgttagtggtgaagggcgtcttgacccatattgggctgacgttaaggaagacctggtctgttacggagggccatggaaaatccgcaacacatgggatggactctcagaagttcagctgatagcggtggccccaaaagagaatcccgtgaacgtccaaacaatgccaggaaagttcattgtggcgaatggaggtgagataggagccgttgtgctcgactatcctcctggaacttctggttcacccatcgtggatcagcagggtaatgtcataggactgtatggcaacggggttatgatcaatgaccaaacgtatgcgagtgccattgcgcaagctccagctgaagttgcgcgcaccccaacctggttcactgatgatatgttgcgaaagggacaattgcatgtgctagacttgcaccctggagcgggaaaaacccgcaaggtcctgcctgagattctcaaagcagcggtggagaaacggctacgcacgttggtcctggccccaaccagagttgtggcaaaggaaatgcatgaagcattgaccgggctgccggtacgctaccagacatcagcagtggcaccaaatggttctggaggagaattgattgatgtcatgtgccatgcaacatacacacaccgccagctgacaccgggacggggggtcaactaccagttatacatagtggatgaggcacattttacagatcccgcttccatcgcagctcgcggcatcattgcgactagggtgcgattgggacatgccgcagcaatcttcatgacggccacacccccgggaatgtcaaacccattcccggagtctaatgctcacattgaagacgaagagcgggaggtacccaccaaagcttggaacgctggatatgagtggataacagactatgggggaaaaaccgtgtggttcgtgccttccatccggatggcgaacaccatagctgcatgcttggtacgagcaggcaagacagtcattgtactgcacagtggctctttcaatgaagaatatcaaaaaaccaagtctggcaattgggatttcgttgtgacgaccgacatctcagaaatgggggccaatttcaaagcctctagggtcatagactctagactgtccataaaaccgatgttttcctacgctcccagtgagcgagtggttattggctcacctagagcggtttctccagccagcgcagcacagcgccgagggagagtcgggagagaccctcgtcaactgggcgaccagtatatctatggtggaccagtaggagaagactcggccgagttcgttcattggaaggaagcaaggatcctcatggataatgtaactgtccctgggggcttgtatccacaattctacgaaccagagggtggaatgtgtgacgccatggatggagctcaccgactgaccgatgctaagagagaagtgttccgagacctcatgaagaaaggggaacttcctgtatggttagcataccaggtggcccaggctgggcatgcgtacactgacagaacttggtgctatggggggccggcggatcatcaagtgtatgatgattgcggccaaaccgtggattacaggtcccttaatggagagaggcgtatgctacgtcccaagtggcttgatcagcgcacctacaacgacaaaacatccttaaggctcttcacggaatttgcagagggacgccgccgatattcggaactaatggacgtgtttggaagaatgccccaacacatgttggacaggaccatcttggctgcagacacgtttaaagatgtcctgacagcaacaccgggatctcgtgtgcaccgtttagcactggacaatttacccgaagctacagaaactatgatggtagtgggaatcctgagtgtctcgaccctaggcgttatgctatttctgatgtcacccaagggcatgacccggatgacctgcggacttgtggtgatcatcctggcgacgtattttctatgggtgtcaggaatggccggctaccagatagcagcaatgcaactcatcgcgttcattctgtttgtggtcttggtgccagagccagggtcacagagatcagtgcaagacaacaccatagcgataattctcatagtcatcctgtcgttggctgccatcatagccgccaatgaagcaggattgctagagaagaccaaaaaggatttcgcgtggaagagggagagtcatgtgctggtgactccgagtccgtggaacctggatttctcaatggatttgaggccagccaccagctggtcattgtatgtggtgatggccaccatgttagggccagtactggaacacgccattgtcaccaattatgctagcgtctcacttactgccatcacaaaccaggcaggaatactgctgtcaatggataagggcactcctttctggaatcttgactggagtgttgtcctgttgtgcgtgggcagctggtcggggatcaatggcactacactaatggttgcttccacaatgacagttttgcattttgccatgatactacctggcattcgtgccaaagcggcgagagaagcacagaatcgaacagcagctggggtgtcaaagaaccctcttattgatgggttaaacaccataaacatccagccgttgccggaaatggaccccatgtacgaaaggaaaatggggctatggatgctaatcgctgttgccggagccgcggtggtttttgacaagagaatgctccattacaccgagttcggagtattgggttcagctgctgtgagtcctctcattgaaggatacgcgtctgctgtttggaacacttccgtagcagccagtgtgtgcaacctaatgcgaggccattacatggcgggaatcccaatggcatactctctgatcagaaatctatccatgaaaggagttcctaggaggggattacaggccacccatacccttggtatggtttggaaacacaaattaaacgccatggacaaggcggcctttaacgcataccggaaggatggagtgacagaagtggatagggagccagcacgtgaagctatgaagaaaggagatttggtgagcggatgggcggtctctcgagggtcagccaagctgcgatggatgcacgagcgtggatacattcccctacaaggagttgtcattgacctcggatgtggaagaggggggtggagttactacgctgctgcacaacgccgggtgaccgctgtcaaagggctcacgaaaggcggaccagggcatgaggagccaatcaacgtccagtcatatggatggaacttagtgacgttccgtagtggagtggatgtctttcacaccgaagtccagccggctgacaccctgttgtgcgacataggagagtcttctgctgaccccgctgtcgaaaaagcgcgcacagtacaagtgttggtgaactttgaaagatggattagagagtcgcggtgtgagcatttttgttgcaaggtgcttggtccctactctcccgaagtgatggagcgcttagatcgtttaacaaagacatatggaggagcggtaattcgcaacccactatccaggaactccacgcatgagatgtactgggtgtcaggagctaagggtaatccagtcaatgctataacagccacctcacgtgtgctaatcgaacgcatgtacagaagacttggcaagagttactgggaagaagatgtgaatcttggtactgggacccgtgcagtttcatgtgccgcggagaagccagatctagcaaaaatcggaaggcgcattgagttgctgaagaaggagtataaagcatcatggttcgaggatccagagcatccctacaagacatggacataccatggttcctacgaaaccaagaccacaggcagctcgtctagtatgattaatggcgttgtcaaggagatcactcacccttgggataccaacccaagggttacaaccgtctgtatgaccgacaccactccttttggacagcagagagtattcaaggaaaaggtagataccaaggcacgtgagccatctcaagggacgcgggagatcatgagaatagtgagcaagtggctcacactatatattggtcggagcaagcgccctaggctgtgcacagcggatgaattcatagccaaagttaatgctgatgccgctctcggcacgatgttcgactcgcagggaaactgggcgaacgccaaagaagctgtgcgcgacccacggttttggcagttggtggccaaagagagggaacttcacctgcgtggacagtgtgccacgtgtgtttacaacatgatggggaagcgagagaaaaagctgacagagtttgggaagtcgaaggggagccgagcaatttggtttatgtggctaggagctaggttcttggagtttgaaagtttaggcttcctaaacgaggatcattggttgtcacgtgaaaactcaggaggtggagttgagggcattggattgcaataccttgggtatgtgttgaaagaaatggcactaattcccgggggcaagatgtacgccgatgacaccgctgggtgggacaccagaattactaacgctgaccttgaggatgagatggacatattgggacttatggacccgcatcacaaaaaactggcaaaaaatctgatggagttggcgtacaacaacaaggtggtcagagtgatgcgccctggtaaagggggaaaaacactaatggacatcattagccgcaaggaccagcggggaagtggacaagtggtcacctacccactcaacacgtggacgaatctcaaggtccaattgatccgtatggcagagtcagagggagtgttggaccccaaggagatcgatggaatcactgtcacgactcggaataacctggaaaaatggctcactagccaaggggctgagcgtctaaagcgcattgcagctagcggtgacgacgttgtggtaaaaccagtggatgagagattcgccaatgctctcacctatctaaacgacatggccaaaattaggaaggacatcagtgagtggaaaccatccgcggggtggttccactgggaagaagtgccattctgctcacaccattttcaccagttggtcctcaaggatgggcgcaccttagtggtcccatgccgtgaccaggatgaactaattggaagggcaagagtgtcacctggtgctggatggactatcagagaaactgcaggtctaagcaaggcctatgcccagatgtggcttctaatgcacttccaccggagggacctcagaatggcaggtttcgccatttgtagtgctgtccccagtgattgggtgcccacgggaaggacatcgtggtcactgcacgctaaaggggagtggatgaccactgaagacatgttagcagtttggaacagagtgtggattgaagacaatccccacatgtctaacaagactttagtgggatcatggcaagacatcccgtaccagaggaaatccctggacatccactgtggctcaatgatagggcagcggtctaggtcaacatgggctgctaacatacgaattagcattggacacgtgcgccgattgattggaaccacggaaaagtacttggattacatgcaggagcaggagcggttcaagattgctgaaccaacccgtctgggcaatgtgatctaa

SEQ ID NO: 389 - protein, 3441 aa, Artificial Sequence
  synthetic
MVTKLRRPVKRAVDMMRRAVPRAAGPRRVLTRVSNTVKRNAGALRALLAYLLYQTFSGRKVGSGARSALKRFNKNDIVKMLLAFRRTLTNIITTMQRRVKGKKRRGVQDVPLLVLLLVGAGAMAAEVTRRGSAYYMYLDRNDAGEAISFPTTLGMNKCYIQIMDLGHMCDATMSYECPMLDEGVEPDDVDCWCNTTSTWVVYGTCHHKKGEARRSRRAVTLPSHSTRKLQTRSQTWLESREYTKHLIRVENWIFRNPGFALAAAAIAWLLGSSTSQKVIYLVMILLIAPAYSIRCIGVSNRDFVEGMSGGTWVDVVLEHGGCVTVMAQDKPTVDIELVTTTVSNMAEVRSYCYEASISDMASDSRCPTQGEAYLDKQSDTQYVCKRTLVDRGWGNGCGLFGKGSLVTCAKFACSKKMTGKSIQPENLEYRIMLSVHGSQHSGMIVNDTGHETDENRAKVEITPNSPRAEATLGGFGSLGLDCEPRTGLDFSDLYYLTMNNKHWLVHKEWFHDIPLPWHAGADTGTPHWNNKEALVEFKDAHAKRQTVVVLGSQEGAVHTALAGALEAEMDGAKGRLSSGHLKCRLKMDKLRLKGVSYSLCTAAFTFTKIPAETLHGTVTVEVQYAGTDGPCKVPAQMAVDMQTLTPVGRLITANPVITESTENSKMMLELDPPFGDSYIVIGVGEKKITHHWHRSGSTIGKAFEATVRGAKRMAVLGDTAWDFGSVGGALNSLGKGIHQIFGAAFKSLFGGMSWFSQILIGTLLMWLGLNTKNGSISLMCLALGGVLIFLSTAVSALSEIGCSLDISRKEMKCGDGVFIFREAGMWKDGYAFHPSEPKSLAASVLKSWQSGVCGVRSTNRMEHAMWKQIENELNGILEENEAQLSVVVRESNGTFPRGERRMHVAEPLRYGWKTWGKTAISTVPLAKETFVVDGNDEGECPSQMRAWNSFQVEEFGTGLVKTKVFLDISTALTAQCDTKMLGAAIKGNRSVHGDPGLWMVSAEIDGTWQIIELTLAESRRCTWPDSHTVWGRNVQESELILPPSFGGPMTNMNKRKGYATQVGGPWNHVPLRVVFEECPGTTVSVEPNCTRRSDSVRSTTDSGKIITDWCCRSCTMPPLTYRTPDGCWYAMEIRPKNVKEESLIRSHVAAGVFKGIDDVSLGLLVMIIFLQEGLRRKLTATYIMWAALVVLIAGILGELTVRDVLRYLILVGTAFAESNNGGDLIHLALVAVFKIRPAFLFGFLFRSQWSPREGVLLASGALMLQIASECLHASAIMQVVDSLSMGWLMIRAIAVPGMTSKAMPLLCACIPAVTSLLAHSTRAGIITMAGMSLIAGSKGSSVKKHSPYMLALVVAGLGARPIGMLAMEAFSHLKGRRSWPAGEMMSAVGLTCALVGAISGASSQDFAGPLAAAALIIIAYAISGRSADVYLEKAGEISWSEDAKISGSSPRIDVCVTENGDFKLRHESEATWTRNCVLAACLVVAGVHPLGIPVAGLMWFGYVKSNKRGTVLWDIPSPQATSAPTVEDGCYRVMSRRLLGSTQLGVGIMLDSTFHTMWHITRGASIVSGEGRLDPYWADVKEDLVCYGGPWKIRNTWDGLSEVQLIAVAPKENPVNVQTMPGKFIVANGGEIGAVVLDYPPGTSGSPIVDQQGNVIGLYGNGVMINDQTYASAIAQAPAEVARTPTWFTDDMLRKGQLHVLDLHPGAGKTRKVLPEILKAAVEKRLRTLVLAPTRVVAKEMHEALTGLPVRYQTSAVAPNGSGGELIDVMCHATYTHRQLTPGRGVNYQLYIVDEAHFTDPASIAARGIIATRVRLGHAAAIFMTATPPGMSNPFPESNAHIEDEEREVPTKAWNAGYEWITDYGGKTVWFVPSIRMANTIAACLVRAGKTVIVLHSGSFNEEYQKTKSGNWDFVVTTDISEMGANFKASRVIDSRLSIKPMFSYAPSERVVIGSPRAVSPASAAQRRGRVGRDPRQLGDQYIYGGPVGEDSAEFVHWKEARILMDNVTVPGGLYPQFYEPEGGMCDAMDGAHRLTDAKREVFRDLMKKGELPVWLAYQVAQAGHAYTDRTWCYGGPADHQVYDDCGQTVDYRSLNGERRMLRPKWLDQRTYNDKTSLRLFTEFAEGRRRYSELMDVFGRMPQHMLDRTILAADTFKDVLTATPGSRVHRLALDNLPEATETMMVVGILSVSTLGVMLFLMSPKGMTRMTCGLVVIILATYFLWVSGMAGYQIAAMQLIAFILFVVLVPEPGSQRSVQDNTIAIILIVILSLAAIIAANEAGLLEKTKKDFAWKRESHVLVTPSPWNLDFSMDLRPATSWSLYVVMATMLGPVLEHAIVTNYASVSLTAITNQAGILLSMDKGTPFWNLDWSVVLLCVGSWSGINGTTLMVASTMTVLHFAMILPGIRAKAAREAQNRTAAGVSKNPLIDGLNTINIQPLPEMDPMYERKMGLWMLIAVAGAAVVFDKRMLHYTEFGVLGSAAVSPLIEGYASAVWNTSVAASVCNLMRGHYMAGIPMAYSLIRNLSMKGVPRRGLQATHTLGMVWKHKLNAMDKAAFNAYRKDGVTEVDREPAREAMKKGDLVSGWAVSRGSAKLRWMHERGYIPLQGVVIDLGCGRGGWSYYAAAQRRVTAVKGLTKGGPGHEEPINVQSYGWNLVTFRSGVDVFHTEVQPADTLLCDIGESSADPAVEKARTVQVLVNFERWIRESRCEHFCCKVLGPYSPEVMERLDRLTKTYGGAVIRNPLSRNSTHEMYWVSGAKGNPVNAITATSRVLIERMYRRLGKSYWEEDVNLGTGTRAVSCAAEKPDLAKIGRRIELLKKEYKASWFEDPEHPYKTWTYHGSYETKTTGSSSSMINGVVKEITHPWDTNPRVTTVCMTDTTPFGQQRVFKEKVDTKAREPSQGTREIMRIVSKWLTLYIGRSKRPRLCTADEFIAKVNADAALGTMFDSQGNWANAKEAVRDPRFWQLVAKERELHLRGQCATCVYNMMGKREKKLTEFGKSKGSRAIWFMWLGARFLEFESLGFLNEDHWLSRENSGGGVEGIGLQYLGYVLKEMALIPGGKMYADDTAGWDTRITNADLEDEMDILGLMDPHHKKLAKNLMELAYNNKVVRVMRPGKGGKTLMDIISRKDQRGSGQVVTYPLNTWTNLKVQLIRMAESEGVLDPKEIDGITVTTRNNLEKWLTSQGAERLKRIAASGDDVVVKPVDERFANALTYLNDMAKIRKDISEWKPSAGWFHWEEVPFCSHHFHQLVLKDGRTLVVPCRDQDELIGRARVSPGAGWTIRETAGLSKAYAQMWLLMHFHRRDLRMAGFAICSAVPSDWVPTGRTSWSLHAKGEWMTTEDMLAVWNRVWIEDNPHMSNKTLVGSWQDIPYQRKSLDIHCGSMIGQRSRSTWAANIRISIGHVRRLIGTTEKYLDYMQEQERFKIAEPTRLGNVI

SEQ ID NO: 390 - DNA, 11830 bp, Artificial Sequence
  synthetic
ggatctacgaacgagaataagtagaagaacggaacgacagagtcaggcctcaaatgagccagcattaatgagagtaagtgctgctgcctgtgcctctccttaacacgtggtagcgccactcgtgtttcgttacctaatagcgctagagtcagacccaagtaggccagggctatggttgtaagccctgctgtctgtggcagccatccagtggtaatgcgtcgcaccactaaggattaatagacgtatattgggagggactggtgaggagcagcaagctcgagctgcatcacccactggtactatcggttagaggaaaccccctccaaaatgtagagcatcatatcgacacctgggaaagaccggagatacctcttgcttcacagcactcaatccacaaggcacagatcgccgaataattgtggattggggattgagaaacatcaagtatctgggtcggcatggcatctccacctcctcgcggtccgacctgggcatccgaaggaggacgtcgtccactcggatggctaagggagagccacttttctctcgattctctatcggaatctagggagctcggatccagacatgataagatacattgatgagtttggacaaaccacaactagaatgcagtgaaaaaaatgctttatttgtgaaatttgtgatgctattgctttatttgtaaccattataagctgcaataaacaagttaacaacaacaattgctcgagggggggcccggtaccttgaagctgtccctgatggtcgtcatctacctgcctggacagcatggcctgcaacgcgggcatcccgatgccgccggaagcgagaagaatcataatggggaaggccatccagcctcgcgtcggcgcttaaggatcatgatgataaacaatgtatggtgctaatgttgcttcaacaacaattctgttgaactgtgttttcatgtttgccaacaagcacctttatactcggtggcctccccaccaccaacttttttgcactgcaaaaaaacacgcttttgcacgcgggcccatacatagtacaaactctacgtttcgtagactattttacataaatagtctacaccgttgtatacgctccaaatacactaccacacattgaacctttttgcagtgcaaaaaagtacgtgtcggcagtcacgtaggccggccttatcgggtcgcgtcctgtcacgtacgaatcacattatcggaccggacgagtgttgtcttatcgtgacaggacgccagcttcctgtgttgctaaccgcagccggacgcaactccttatcggaacaggacgcgcctccatatcagccgcgcgttatctcatgcgcgtgaccggacacgaggcgcccgtcccgcttatcgcgcctataaatacagcccgcaacgatctggtaaacagtatattttgcgtgtgcgtttcaaaacacagattgtattgaaagtacgtaagagtataacacgttggaataaagttttggatcaagaggaaaatcatggttacaaaactcaggaggcccgttaaacgggccgtcgatatgatgaggcgcgcggtaccccgcgccgcaggaccccggcgggtcctaactagggtatcaaataccgtgaagcgtaacgcaggcgctcttagagctcttctggcttatctgctgtaccagacattctctgggcggaaagttggtagtggtgctcggagcgcccttaagcgcttcaacaaaaatgacattgtgaaaatgttgctggcgttcagacggacattgacaaacatcatcacaaccatgcagcgtcgtgtgaaaggaaagaaacgtcgtggcgttcaagatgtgccgctattggtcttgctgctcgttggagcaggagcgatggctgcggaggtcactagacgtgggagtgcatactatatgtacttggacagaaacgatgctggggaggccatatcttttccaaccacattggggatgaataagtgttatatacagatcatggatcttggacacatgtgtgatgccaccatgagctatgaatgccctatgctggatgagggggtggaaccagatgacgtcgattgttggtgcaacacgacgtcaacttgggttgtgtacggaacctgccatcacaaaaaaggtgaagcacggagatctagaagagctgtgacgctcccctcccattccactaggaagctgcaaacgcggtcgcaaacctggttggaatcaagagaatacacaaagcacttgattagagtcgaaaattggatattcaggaaccctggcttcgcgttagcagcagctgccatcgcttggcttttgggaagctcaacgagccaaaaagtcatatacttggtcatgatactgctgattgccccggcatacagcatcaggtgcataggagtcagcaatagggactttgtggaaggtatgtcaggtgggacttgggttgatgttgtcttggaacatggaggttgtgtcaccgtaatggcacaggacaaaccgactgtcgacatagagctggttacaacaacagtcagcaacatggcggaggtaagatcctactgctatgaggcatcaatatcagacatggcttcggacagccgctgcccaacacaaggtgaagcctaccttgacaagcaatcagacactcaatatgtctgcaaaagaacgttagtggacagaggctggggaaatggatgtggactttttggcaaagggagcctggtgacatgcgctaagtttgcatgctccaagaaaatgaccgggaagagcatccagccagagaatctggagtaccggataatgctgtcagttcatggctcccagcacagtgggatgatcgttaatgacacaggacatgaaactgatgagaatagagcgaaggttgagataacgcccaattcaccaagagccgaagccaccctggggggttttggaagcctaggacttgattgtgaaccgaggacaggccttgacttttcagatttgtattacttgactatgaataacaagcactggttggtccacaaggagtggttccacgacattccattaccttggcacgctggggcagacaccggaactccacactggaacaacaaagaagcactggtagagttcaaggacgcacatgccaaaaggcaaactgtcgtggttctagggagtcaagaaggagcagttcacacggcccttgctggagctctggaggctgagatggatggtgcaaagggaaggctgtcctctggccacttgaaatgtcgcctgaaaatggataaacttagattgaagggcgtgtcatactccttgtgtaccgcagcgttcacattcaccaagatcccggctgaaacactgcacgggacagtcacagtggaggtacagtacgcagggacagatggaccttgcaaggttccagctcagatggcggtggacatgcaaactctgaccccagttgggaggttgataaccgctaaccccgtaatcactgaaagcactgagaactctaagatgatgctggaacttgatccaccatttggggactcttacattgtcataggagtcggggagaagaagatcacccaccactggcacaggagtggcagcaccattggaaaagcatttgaagccactgtgagaggtgccaagagaatggcagtcttgggagacacagcctgggactttggatcagttggaggcgctctcaactcattgggcaagggcatccatcaaatttttggagcagctttcaaatcattgtttggaggaatgtcctggttctcacaaatcctcattggaacgttgctgatgtggttgggtctgaacacaaagaatggatctatttcccttatgtgcttggccttagggggagtgttgatcttcttatccacagccgtctctgctctatcggaaataggatgcagtctggacattagccgaaaagaaatgaagtgtggggacggagtcttcatcttcagagaggcaggcatgtggaaggatgggtatgcgttccacccttccgaacccaaatctctggccgcgtcagttctcaagagttggcagtctggagtgtgcggcgtgcgctccacgaacagaatggaacatgccatgtggaaacagattgaaaatgaattgaacggcattctagaagagaatgaggcgcaactcagcgtggttgtgcgagagtctaacgggaccttcccgagaggagagcgccgcatgcacgtggccgaacctctgcgctatggatggaagacctggggaaagaccgcaatttcgacggtgccgctcgctaaagaaacgtttgtggtagatggcaatgatgaaggagaatgtccctctcaaatgcgtgcttggaattccttccaagttgaagagttcggaactgggctggtgaaaaccaaagtgttcttggacatatccactgctctcaccgcccaatgtgacaccaaaatgctgggcgctgccataaaggggaataggtctgttcatggagatccaggtctctggatggtctcagctgaaatcgatgggacatggcagataatagagctcacattggcagagagcaggcgttgcacatggccagactctcacaccgtgtggggtaggaatgtccaggagagtgagttgatactgccaccgtctttcggaggaccgatgaccaacatgaacaagcgtaaaggctacgcgacccaagtgggaggaccatggaaccatgttccactacgagtagtttttgaagagtgtccgggaaccactgtatctgttgaaccaaactgcaccaggagatcggattcagtgcgatccacaactgatagcggcaagattataaccgactggtgttgtcgttcctgtacaatgcctcccctaacgtaccgaacccccgatggatgctggtatgcaatggaaatcaggcccaagaatgttaaagaggagagtctgatccgttcgcatgtggcggcaggtgtgtttaaaggcattgacgacgtgtcactggggctgttagtaatgataattttcctgcaggaaggtttgagaagaaagttaactgcaacgtatatcatgtgggctgctcttgtggtcctcattgcaggaatcctaggggaactcacagtgagggatgtgctcaggtatctcatcctagtcggcactgcattcgctgagagtaataatggaggagatttaatacatctggccctagtggcggtcttcaagattaggccggcattcttatttggattcttgttcaggagtcagtggtcccccagagaaggtgtgttgctggcatctggagcgctgatgctgcagattgcaagtgagtgcttgcacgcatcggcgattatgcaggttgtcgattccttgagcatggggtggttgatgatcagagccattgctgtacctggtatgacctcaaaagccatgccactgctgtgtgcctgcattcctgcagttacgagcctactggcccactcaaccagagccggtataatcaccatggccggcatgtcgcttattgcaggaagtaagggatcatcagttaaaaaacacagtccatacatgcttgccctcgtggtggcaggcctcggagcccgtcccataggaatgttggcgatggaagccttctctcacctgaagggccggagatcatggccggctggtgagatgatgtcagccgttgggctgacatgtgcgctagtgggagctatcagtggcgcatcatctcaggacttcgccggacctctagcagcagcggctctaattattattgcatatgccattagtggacgctcagctgatgtataccttgagaaagccggtgagatatcctggagtgaggacgctaaaatatccggatcaagcccgcgcattgatgtgtgcgttaccgaaaatggagatttcaaattgcgtcatgagagtgaagcaacctggacccggaattgtgtcttggctgcttgcttagtcgtagccggagtgcacccactggggattccagtagcagggttgatgtggtttggatatgtgaaatcaaacaagcgggggactgtgttgtgggacattccctcaccacaggcaacatcagctccaacggtggaagatggatgctaccgcgttatgtcacgtagactgcttggcagcactcagcttggtgttgggatcatgctagactctacatttcacacaatgtggcacataacccgaggagcatctattgttagtggtgaagggcgtcttgacccatattgggctgacgttaaggaagacctggtctgttacggagggccatggaaaatccgcaacacatgggatggactctcagaagttcagctgatagcggtggccccaaaagagaatcccgtgaacgtccaaacaatgccaggaaagttcattgtggcgaatggaggtgagataggagccgttgtgctcgactatcctcctggaacttctggttcacccatcgtggatcagcagggtaatgtcataggactgtatggcaacggggttatgatcaatgaccaaacgtatgcgagtgccattgcgcaagctccagctgaagttgcgcgcaccccaacctggttcactgatgatatgttgcgaaagggacaattgcatgtgctagacttgcaccctggagcgggaaaaacccgcaaggtcctgcctgagattctcaaagcagcggtggagaaacggctacgcacgttggtcctggccccaaccagagttgtggcaaaggaaatgcatgaagcattgaccgggctgccggtacgctaccagacatcagcagtggcaccaaatggttctggaggagaattgattgatgtcatgtgccatgcaacatacacacaccgccagctgacaccgggacggggggtcaactaccagttatacatagtggatgaggcacattttacagatcccgcttccatcgcagctcgcggcatcattgcgactagggtgcgattgggacatgccgcagcaatcttcatgacggccacacccccgggaatgtcaaacccattcccggagtctaatgctcacattgaagacgaagagcgggaggtacccaccaaagcttggaacgctggatatgagtggataacagactatgggggaaaaaccgtgtggttcgtgccttccatccggatggcgaacaccatagctgcatgcttggtacgagcaggcaagacagtcattgtactgcacagtggctctttcaatgaagaatatcaaaaaaccaagtctggcaattgggatttcgttgtgacgaccgacatctcagaaatgggggccaatttcaaagcctctagggtcatagactctagactgtccataaaaccgatgttttcctacgctcccagtgagcgagtggttattggctcacctagagcggtttctccagccagcgcagcacagcgccgagggagagtcgggagagaccctcgtcaactgggcgaccagtatatctatggtggaccagtaggagaagactcggccgagttcgttcattggaaggaagcaaggatcctcatggataatgtaactgtccctgggggcttgtatccacaattctacgaaccagagggtggaatgtgtgacgccatggatggagctcaccgactgaccgatgctaagagagaagtgttccgagacctcatgaagaaaggggaacttcctgtatggttagcataccaggtggcccaggctgggcatgcgtacactgacagaacttggtgctatggggggccggcggatcatcaagtgtatgatgattgcggccaaaccgtggattacaggtcccttaatggagagaggcgtatgctacgtcccaagtggcttgatcagcgcacctacaacgacaaaacatccttaaggctcttcacggaatttgcagagggacgccgccgatattcggaactaatggacgtgtttggaagaatgccccaacacatgttggacaggaccatcttggctgcagacacgtttaaagatgtcctgacagcaacaccgggatctcgtgtgcaccgtttagcactggacaatttacccgaagctacagaaactatgatggtagtgggaatcctgagtgtctcgaccctaggcgttatgctatttctgatgtcacccaagggcatgacccggatgacctgcggacttgtggtgatcatcctggcgacgtattttctatgggtgtcaggaatggccggctaccagatagcagcaatgcaactcatcgcgttcattctgtttgtggtcttggtgccagagccagggtcacagagatcagtgcaagacaacaccatagcgataattctcatagtcatcctgtcgttggctgccatcatagccgccaatgaagcaggattgctagagaagaccaaaaaggatttcgcgtggaagagggagagtcatgtgctggtgactccgagtccgtggaacctggatttctcaatggatttgaggccagccaccagctggtcattgtatgtggtgatggccaccatgttagggccagtactggaacacgccattgtcaccaattatgctagcgtctcacttactgccatcacaaaccaggcaggaatactgctgtcaatggataagggcactcctttctggaatcttgactggagtgttgtcctgttgtgcgtgggcagctggtcggggatcaatggcactacactaatggttgcttccacaatgacagttttgcattttgccatgatactacctggcattcgtgccaaagcggcgagagaagcacagaatcgaacagcagctggggtgtcaaagaaccctcttattgatgggttaaacaccataaacatccagccgttgccggaaatggaccccatgtacgaaaggaaaatggggctatggatgctaatcgctgttgccggagccgcggtggtttttgacaagagaatgctccattacaccgagttcggagtattgggttcagctgctgtgagtcctctcattgaaggatacgcgtctgctgtttggaacacttccgtagcagccagtgtgtgcaacctaatgcgaggccattacatggcgggaatcccaatggcatactctctgatcagaaatctatccatgaaaggagttcctaggaggggattacaggccacccatacccttggtatggtttggaaacacaaattaaacgccatggacaaggcggcctttaacgcataccggaaggatggagtgacagaagtggatagggagccagcacgtgaagctatgaagaaaggagatttggtgagcggatgggcggtctctcgagggtcagccaagctgcgatggatgcacgagcgtggatacattcccctacaaggagttgtcattgacctcggatgtggaagaggggggtggagttactacgctgctgcacaacgccgggtgaccgctgtcaaagggctcacgaaaggcggaccagggcatgaggagccaatcaacgtccagtcatatggatggaacttagtgacgttccgtagtggagtggatgtctttcacaccgaagtccagccggctgacaccctgttgtgcgacataggagagtcttctgctgaccccgctgtcgaaaaagcgcgcacagtacaagtgttggtgaactttgaaagatggattagagagtcgcggtgtgagcatttttgttgcaaggtgcttggtccctactctcccgaagtgatggagcgcttagatcgtttaacaaagacatatggaggagcggtaattcgcaacccactatccaggaactccacgcatgagatgtactgggtgtcaggagctaagggtaatccagtcaatgctataacagccacctcacgtgtgctaatcgaacgcatgtacagaagacttggcaagagttactgggaagaagatgtgaatcttggtactgggacccgtgcagtttcatgtgccgcggagaagccagatctagcaaaaatcggaaggcgcattgagttgctgaagaaggagtataaagcatcatggttcgaggatccagagcatccctacaagacatggacataccatggttcctacgaaaccaagaccacaggcagctcgtctagtatgattaatggcgttgtcaaggagatcactcacccttgggataccaacccaagggttacaaccgtctgtatgaccgacaccactccttttggacagcagagagtattcaaggaaaaggtagataccaaggcacgtgagccatctcaagggacgcgggagatcatgagaatagtgagcaagtggctcacactatatattggtcggagcaagcgccctaggctgtgcacagcggatgaattcatagccaaagttaatgctgatgccgctctcggcacgatgttcgactcgcagggaaactgggcgaacgccaaagaagctgtgcgcgacccacggttttggcagttggtggccaaagagagggaacttcacctgcgtggacagtgtgccacgtgtgtttacaacatgatggggaagcgagagaaaaagctgacagagtttgggaagtcgaaggggagccgagcaatttggtttatgtggctaggagctaggttcttggagtttgaaagtttaggcttcctaaacgaggatcattggttgtcacgtgaaaactcaggaggtggagttgagggcattggattgcaataccttgggtatgtgttgaaagaaatggcactaattcccgggggcaagatgtacgccgatgacaccgctgggtgggacaccagaattactaacgctgaccttgaggatgagatggacatattgggacttatggacccgcatcacaaaaaactggcaaaaaatctgatggagttggcgtacaacaacaaggtggtcagagtgatgcgccctggtaaagggggaaaaacactaatggacatcattagccgcaaggaccagcggggaagtggacaagtggtcacctacccactcaacacgtggacgaatctcaaggtccaattgatccgtatggcagagtcagagggagtgttggaccccaaggagatcgatggaatcactgtcacgactcggaataacctggaaaaatggctcactagccaaggggctgagcgtctaaagcgcattgcagctagcggtgacgacgttgtggtaaaaccagtggatgagagattcgccaatgctctcacctatctaaacgacatggccaaaattaggaaggacatcagtgagtggaaaccatccgcggggtggttccactgggaagaagtgccattctgctcacaccattttcaccagttggtcctcaaggatgggcgcaccttagtggtcccatgccgtgaccaggatgaactaattggaagggcaagagtgtcacctggtgctggatggactatcagagaaactgcaggtctaagcaaggcctatgcccagatgtggcttctaatgcacttccaccggagggacctcagaatggcaggtttcgccatttgtagtgctgtccccagtgattgggtgcccacgggaaggacatcgtggtcactgcacgctaaaggggagtggatgaccactgaagacatgttagcagtttggaacagagtgtggattgaagacaatccccacatgtctaacaagactttagtgggatcatggcaagacatcccgtaccagaggaaatccctggacatccactgtggctcaatgatagggcagcggtctaggtcaacatgggctgctaacatacgaattagcattggacacgtgcgccgattgattggaaccacggaaaagtacttggattacatgcaggagcaggagcggttcaagattgctgaaccaacccgtctgggcaatgtgatctaa

SEQ ID NO: 391 - protein, 3440 aa, Artificial Sequence
  synthetic
MVTKLRRPVKRAVDMMRRAVPRAAGPRRVLTRVSNTVKRNAGALRALLAYLLYQTFSGRKVGSGARSALKRFNKNDIVKMLLAFRRTLTNIITTMQRRVKGKKRRGVQDVPLLVLLLVGAGAMAAEVTRRGSAYYMYLDRNDAGEAISFPTTLGMNKCYIQIMDLGHMCDATMSYECPMLDEGVEPDDVDCWCNTTSTWVVYGTCHHKKGEARRSRRAVTLPSHSTRKLQTRSQTWLESREYTKHLIRVENWIFRNPGFALAAAAIAWLLGSSTSQKVIYLVMILLIAPAYSIRCIGVSNRDFVEGMSGGTWVDVVLEHGGCVTVMAQDKPTVDIELVTTTVSNMAEVRSYCYEASISDMASDSRCPTQGEAYLDKQSDTQYVCKRTLVDRGWGNGCGLFGKGSLVTCAKFACSKKMTGKSIQPENLEYRIMLSVHGSQHSGMIVNDTGHETDENRAKVEITPNSPRAEATLGGFGSLGLDCEPRTGLDFSDLYYLTMNNKHWLVHKEWFHDIPLPWHAGADTGTPHWNNKEALVEFKDAHAKRQTVVVLGSQEGAVHTALAGALEAEMDGAKGRLSSGHLKCRLKMDKLRLKGVSYSLCTAAFTFTKIPAETLHGTVTVEVQYAGTDGPCKVPAQMAVDMQTLTPVGRLITANPVITESTENSKMMLELDPPFGDSYIVIGVGEKKITHHWHRSGSTIGKAFEATVRGAKRMAVLGDTAWDFGSVGGALNSLGKGIHQIFGAAFKSLFGGMSWFSQILIGTLLMWLGLNTKNGSISLMCLALGGVLIFLSTAVSALSEIGCSLDISRKEMKCGDGVFIFREAGMWKDGYAFHPSEPKSLAASVLKSWQSGVCGVRSTNRMEHAMWKQIENELNGILEENEAQLSVVVRESNGTFPRGERRMHVAEPLRYGWKTWGKTAISTVPLAKETFVVDGNDEGECPSQMRAWNSFQVEEFGTGLVKTKVFLDISTALTAQCDTKMLGAAIKGNRSVHGDPGLWMVSAEIDGTWQIIELTLAESRRCTWPDSHTVWGRNVQESELILPPSFGGPMTNMNKRKGYATQVGGPWNHVPLRVVFEECPGTTVSVEPNCTRRSDSVRSTTDSGKIITDWCCRSCTMPPLTYRTPDGCWYAMEIRPKNVKEESLIRSHVAAGVFKGIDDVSLGLLVMIIFLQEGLRRKLTATYIMWAALVVLIAGILGELTVRDVLRYLILVGTAFAESNNGGDLIHLALVAVFKIRPAFLFGFLFRSQWSPREGVLLASGALMLQIASECLHASAIMQVVDSLSMGWLMIRAIAVPGMTSKAMPLLCACIPAVTSLLAHSTRAGIITMAGMSLIAGSKGSSVKKHSPYMLALVVAGLGARPIGMLAMEAFSHLKGRRSWPAGEMMSAVGLTCALVGAISGASSQDFAGPLAAAALIIIAYAISGRSADVYLEKAGEISWSEDAKISGSSPRIDVCVTENGDFKLRHESEATWTRNCVLAACLVVAGVHPLGIPVAGLMWFGYVKSNKRGTVLWDIPSPQATSAPTVEDGCYRVMSRRLLGSTQLGVGIMLDSTFHTMWHITRGASIVSGEGRLDPYWADVKEDLVCYGGPWKIRNTWDGLSEVQLIAVAPKENPVNVQTMPGKFIVANGGEIGAVVLDYPPGTSGSPIVDQQGNVIGLYGNGVMINDQTYASAIAQAPAEVARTPTWFTDDMLRKGQLHVLDLHPGAGKTRKVLPEILKAAVEKRLRTLVLAPTRVVAKEMHEALTGLPVRYQTSAVAPNGSGGELIDVMCHATYTHRQLTPGRGVNYQLYIVDEAHFTDPASIAARGIIATRVRLGHAAAIFMTATPPGMSNPFPESNAHIEDEEREVPTKAWNAGYEWITDYGGKTVWFVPSIRMANTIAACLVRAGKTVIVLHSGSFNEEYQKTKSGNWDFVVTTDISEMGANFKASRVIDSRLSIKPMFSYAPSERVVIGSPRAVSPASAAQRRGRVGRDPRQLGDQYIYGGPVGEDSAEFVHWKEARILMDNVTVPGGLYPQFYEPEGGMCDAMDGAHRLTDAKREVFRDLMKKGELPVWLAYQVAQAGHAYTDRTWCYGGPADHQVYDDCGQTVDYRSLNGERRMLRPKWLDQRTYNDKTSLRLFTEFAEGRRRYSELMDVFGRMPQHMLDRTILAADTFKDVLTATPGSRVHRLALDNLPEATETMMVVGILSVSTLGVMLFLMSPKGMTRMTCGLVVIILATYFLWVSGMAGYQIAAMQLIAFILFVVLVPEPGSQRSVQDNTIAIILIVILSLAAIIAANEAGLLEKTKKDFAWKRESHVLVTPSPWNLDFSMDLRPATSWSLYVVMATMLGPVLEHAIVTNYASVSLTAITNQAGILLSMDKGTPFWNLDWSVVLLCVGSWSGINGTTLMVASTMTVLHFAMILPGIRAKAAREAQNRTAAGVSKNPLIDGLNTINIQPLPEMDPMYERKMGLWMLIAVAGAAVVFDKRMLHYTEFGVLGSAAVSPLIEGYASAVWNTSVAASVCNLMRGHYMAGIPMAYSLIRNLSMKGVPRRGLQATHTLGMVWKHKLNAMDKAAFNAYRKDGVTEVDREPAREAMKKGDLVSGWAVSRGSAKLRWMHERGYIPLQGVVIDLGCGRGGWSYYAAAQRRVTAVKGLTKGGPGHEEPINVQSYGWNLVTFRSGVDVFHTEVQPADTLLCDIGESSADPAVEKARTVQVLVNFERWIRESRCEHFCCKVLGPYSPEVMERLDRLTKTYGGAVIRNPLSRNSTHEMYWVSGAKGNPVNAITATSRVLIERMYRRLGKSYWEEDVNLGTGTRAVSCAAEKPDLAKIGRRIELLKKEYKASWFEDPEHPYKTWTYHGSYETKTTGSSSSMINGVVKEITHPWDTNPRVTTVCMTDTTPFGQQRVFKEKVDTKAREPSQGTREIMRIVSKWLTLYIGRSKRPRLCTADEFIAKVNADAALGTMFDSQGNWANAKEAVRDPRFWQLVAKERELHLRGQCATCVYNMMGKREKKLTEFGKSKGSRAIWFMWLGARFLEFESLGFLNEDHWLSRENSGGGVEGIGLQYLGYVLKEMALIPGGKMYADDTAGWDTRITNADLEDEMDILGLMDPHHKKLAKNLMELAYNNKVVRVMRPGKGGKTLMDIISRKDQRGSGQVVTYPLNTWTNLKVQLIRMAESEGVLDPKEIDGITVTTRNNLEKWLTSQGAERLKRIAASGDDVVVKPVDERFANALTYLNDMAKIRKDISEWKPSAGWFHWEEVPFCSHHFHQLVLKDGRTLVVPCRDQDELIGRARVSPGAGWTIRETAGLSKAYAQMWLLMHFHRRDLRMAGFAICSAVPSDWVPTGRTSWSLHAKGEWMTTEDMLAVWNRVWIEDNPHMSNKTLVGSWQDIPYQRKSLDIHCGSMIGQRSRSTWAANIRISIGHVRRLIGTTEKYLDYMQEQERFKIAEPTRLGNV

SEQ ID NO: 392 - DNA, 11821 bp, Artificial Sequence
  synthetic
gggtcggcatggcatctccacctcctcgcggtccgacctgggcatccgaaggaggacgtcgtccactcggatggctaagggagagccacttttctctcgattctctatcggaatctagggagctcggatccagacatgataagatacattgatgagtttggacaaaccacaactagaatgcagtgaaaaaaatgctttatttgtgaaatttgtgatgctattgctttatttgtaaccattataagctgcaataaacaagttaacaacaacaattgctcgagggggggcccggtaccttgaagctgtccctgatggtcgtcatctacctgcctggacagcatggcctgcaacgcgggcatcccgatgccgccggaagcgagaagaatcataatggggaaggccatccagcctcgcgtcggcgcttaaggatcatgatgataaacaatgtatggtgctaatgttgcttcaacaacaattctgttgaactgtgttttcatgtttgccaacaagcacctttatactcggtggcctccccaccaccaacttttttgcactgcaaaaaaacacgcttttgcacgcgggcccatacatagtacaaactctacgtttcgtagactattttacataaatagtctacaccgttgtatacgctccaaatacactaccacacattgaacctttttgcagtgcaaaaaagtacgtgtcggcagtcacgtaggccggccttatcgggtcgcgtcctgtcacgtacgaatcacattatcggaccggacgagtgttgtcttatcgtgacaggacgccagcttcctgtgttgctaaccgcagccggacgcaactccttatcggaacaggacgcgcctccatatcagccgcgcgttatctcatgcgcgtgaccggacacgaggcgcccgtcccgcttatcgcgcctataaatacagcccgcaacgatctggtaaacagtatattttgcgtgtgcgtttcaaaacacagattgtattgaaagtacgtaagagtataacacgttggaataaagttttggatcaagaggaaaatcatggttacaaaactcaggaggcccgttaaacgggccgtcgatatgatgaggcgcgcggtaccccgcgccgcaggaccccggcgggtcctaactagggtatcaaataccgtgaagcgtaacgcaggcgctcttagagctcttctggcttatctgctgtaccagacattctctgggcggaaagttggtagtggtgctcggagcgcccttaagcgcttcaacaaaaatgacattgtgaaaatgttgctggcgttcagacggacattgacaaacatcatcacaaccatgcagcgtcgtgtgaaaggaaagaaacgtcgtggcgttcaagatgtgccgctattggtcttgctgctcgttggagcaggagcgatggctgccactttacgcaccgttggagacttgacatggctaaatgtgtcaaccactgatgttggaaagtggatacgtgtggagaataggcacggcaaaggagagtgtttcgtcacggccactgacgttggaacatggtgctcagactctgtgggatatgaatgtcctcaaattgcaccggcgtatgaccctgaagacttggattgctactgccgaaacacctcaacctacgttacttatggaaggtgtaaaaatgggcgcagtggacgatctcgcagcaagagagcaatcacgatagccccgcacggcgaagcaggattgcgtgttggaagcaccaagcattggacttctagagcaactccacaacggtatctaatgcgcgttgagaaatgggtgctgcggcatcctctacctgctctcgtgttggtggtactgggatggatgatgggtcgttctcacggccagagggccatgtatatagtgctgatgctgcttgtggctccgtcatatggtaaccaatgcctggatgtgcagtcacgtgatttcgtgcaaggggttagtggtggcacctgggtagatgttgttttggatcatgacaattgcataaccattgttgctgacgggaaaccatcttttgatattcgtttgtcgaaaatgagcatgtctaaattcgcagagtacaaacggtattgcctccaggccacgatgagtgatgtcactagcatagtggcgtgtccaggggctggggatgctcataatgacaagagcaaaaaccacgagtacatttgcaaagctgttaacaatgaccgcggatggggcaatgggtgtgtcctttttggcaaaggatcaatggaaacttgtggtaagtttgaatgtaagaagaaaatggctggcaagttagtggcacgtgagaacgtggaatcagtggtcactgtgcatgtacatggtgccactactgtggagtcgcacggaaactactccacacaggttggagccactcaggcagggaaagcgactatcacgccaaaagcttctgtggctactctaaatttaaacgactttggtagcctggaggtggattgttcaactgatgttggcatggactttggagagattgtggtggccgacatgtcaggaaagtggtggatcgtgaacaaggattggttcaatgaacttgctttgccgtggtccacggctagcaccactgctgaagtttggcaggcacgagacagacttgttgagtttggatggccacatgcggccaagcagaacatctatgacattggggaccaagaaggagctgtgacggctgccatagcccaggcacccatggcgaaatgggagtctgacaaggtcgagctaatctctgggattctcaagtgcaaggtgaaacttggcaacctaaagctgcgtggggtgacctatagcatgtgtgcccagacattcaccacggaaacaaggccggccgacaccggacatggcactgtggctttcaaggtgaaatacgtcggaacagacgtgccttgccgggtcccactccacatcatagacagtgacggcggagtggccgctggacgagtgataacggcacaccccttcgtcatgaagcagaatgattacattattctggaagttgaaccacccttcggtgacagcaaaattgagattggaacaggaacaacaaaactcgttgaagcatggcatcgaaaaggtagctcgataggaaatgcctttacggccacttacaagggcatcacaaaattgacagtgcttggagaacatgcctgggattttaattcactaggtgggtttggagcaagccttgggaaggcggtccatacactgtttggaggtgtattccgggtgatgttcggaggcatgggatggttaaccaagatctttgtgggtgctgtcctagtctggctaggattaggagctcatgacaagacgatcgccaccaccatgatcctggtaggatccatactgatgtacatggcagtgaccgtgggtgccctatcggaaataggatgcagtctggacattagccgaaaagaaatgaagtgtggggacggagtcttcatcttcagagaggcaggcatgtggaaggatgggtatgcgttccacccttccgaacccaaatctctggccgcgtcagttctcaagagttggcagtctggagtgtgcggcgtgcgctccacgaacagaatggaacatgccatgtggaaacagattgaaaatgaattgaacggcattctagaagagaatgaggcgcaactcagcgtggttgtgcgagagtctaacgggaccttcccgagaggagagcgccgcatgcacgtggccgaacctctgcgctatggatggaagacctggggaaagaccgcaatttcgacggtgccgctcgctaaagaaacgtttgtggtagatggcaatgatgaaggagaatgtccctctcaaatgcgtgcttggaattccttccaagttgaagagttcggaactgggctggtgaaaaccaaagtgttcttggacatatccactgctctcaccgcccaatgtgacaccaaaatgctgggcgctgccataaaggggaataggtctgttcatggagatccaggtctctggatggtctcagctgaaatcgatgggacatggcagataatagagctcacattggcagagagcaggcgttgcacatggccagactctcacaccgtgtggggtaggaatgtccaggagagtgagttgatactgccaccgtctttcggaggaccgatgaccaacatgaacaagcgtaaaggctacgcgacccaagtgggaggaccatggaaccatgttccactacgagtagtttttgaagagtgtccgggaaccactgtatctgttgaaccaaactgcaccaggagatcggattcagtgcgatccacaactgatagcggcaagattataaccgactggtgttgtcgttcctgtacaatgcctcccctaacgtaccgaacccccgatggatgctggtatgcaatggaaatcaggcccaagaatgttaaagaggagagtctgatccgttcgcatgtggcggcaggtgtgtttaaaggcattgacgacgtgtcactggggctgttagtaatgataattttcctgcaggaaggtttgagaagaaagttaactgcaacgtatatcatgtgggctgctcttgtggtcctcattgcaggaatcctaggggaactcacagtgagggatgtgctcaggtatctcatcctagtcggcactgcattcgctgagagtaataatggaggagatttaatacatctggccctagtggcggtcttcaagattaggccggcattcttatttggattcttgttcaggagtcagtggtcccccagagaaggtgtgttgctggcatctggagcgctgatgctgcagattgcaagtgagtgcttgcacgcatcggcgattatgcaggttgtcgattccttgagcatggggtggttgatgatcagagccattgctgtacctggtatgacctcaaaagccatgccactgctgtgtgcctgcattcctgcagttacgagcctactggcccactcaaccagagccggtataatcaccatggccggcatgtcgcttattgcaggaagtaagggatcatcagttaaaaaacacagtccatacatgcttgccctcgtggtggcaggcctcggagcccgtcccataggaatgttggcgatggaagccttctctcacctgaagggccggagatcatggccggctggtgagatgatgtcagccgttgggctgacatgtgcgctagtgggagctatcagtggcgcatcatctcaggacttcgccggacctctagcagcagcggctctaattattattgcatatgccattagtggacgctcagctgatgtataccttgagaaagccggtgagatatcctggagtgaggacgctaaaatatccggatcaagcccgcgcattgatgtgtgcgttaccgaaaatggagatttcaaattgcgtcatgagagtgaagcaacctggacccggaattgtgtcttggctgcttgcttagtcgtagccggagtgcacccactggggattccagtagcagggttgatgtggtttggatatgtgaaatcaaacaagcgggggactgtgttgtgggacattccctcaccacaggcaacatcagctccaacggtggaagatggatgctaccgcgttatgtcacgtagactgcttggcagcactcagcttggtgttgggatcatgctagactctacatttcacacaatgtggcacataacccgaggagcatctattgttagtggtgaagggcgtcttgacccatattgggctgacgttaaggaagacctggtctgttacggagggccatggaaaatccgcaacacatgggatggactctcagaagttcagctgatagcggtggccccaaaagagaatcccgtgaacgtccaaacaatgccaggaaagttcattgtggcgaatggaggtgagataggagccgttgtgctcgactatcctcctggaacttctggttcacccatcgtggatcagcagggtaatgtcataggactgtatggcaacggggttatgatcaatgaccaaacgtatgcgagtgccattgcgcaagctccagctgaagttgcgcgcaccccaacctggttcactgatgatatgttgcgaaagggacaattgcatgtgctagacttgcaccctggagcgggaaaaacccgcaaggtcctgcctgagattctcaaagcagcggtggagaaacggctacgcacgttggtcctggccccaaccagagttgtggcaaaggaaatgcatgaagcattgaccgggctgccggtacgctaccagacatcagcagtggcaccaaatggttctggaggagaattgattgatgtcatgtgccatgcaacatacacacaccgccagctgacaccgggacggggggtcaactaccagttatacatagtggatgaggcacattttacagatcccgcttccatcgcagctcgcggcatcattgcgactagggtgcgattgggacatgccgcagcaatcttcatgacggccacacccccgggaatgtcaaacccattcccggagtctaatgctcacattgaagacgaagagcgggaggtacccaccaaagcttggaacgctggatatgagtggataacagactatgggggaaaaaccgtgtggttcgtgccttccatccggatggcgaacaccatagctgcatgcttggtacgagcaggcaagacagtcattgtactgcacagtggctctttcaatgaagaatatcaaaaaaccaagtctggcaattgggatttcgttgtgacgaccgacatctcagaaatgggggccaatttcaaagcctctagggtcatagactctagactgtccataaaaccgatgttttcctacgctcccagtgagcgagtggttattggctcacctagagcggtttctccagccagcgcagcacagcgccgagggagagtcgggagagaccctcgtcaactgggcgaccagtatatctatggtggaccagtaggagaagactcggccgagttcgttcattggaaggaagcaaggatcctcatggataatgtaactgtccctgggggcttgtatccacaattctacgaaccagagggtggaatgtgtgacgccatggatggagctcaccgactgaccgatgctaagagagaagtgttccgagacctcatgaagaaaggggaacttcctgtatggttagcataccaggtggcccaggctgggcatgcgtacactgacagaacttggtgctatggggggccggcggatcatcaagtgtatgatgattgcggccaaaccgtggattacaggtcccttaatggagagaggcgtatgctacgtcccaagtggcttgatcagcgcacctacaacgacaaaacatccttaaggctcttcacggaatttgcagagggacgccgccgatattcggaactaatggacgtgtttggaagaatgccccaacacatgttggacaggaccatcttggctgcagacacgtttaaagatgtcctgacagcaacaccgggatctcgtgtgcaccgtttagcactggacaatttacccgaagctacagaaactatgatggtagtgggaatcctgagtgtctcgaccctaggcgttatgctatttctgatgtcacccaagggcatgacccggatgacctgcggacttgtggtgatcatcctggcgacgtattttctatgggtgtcaggaatggccggctaccagatagcagcaatgcaactcatcgcgttcattctgtttgtggtcttggtgccagagccagggtcacagagatcagtgcaagacaacaccatagcgataattctcatagtcatcctgtcgttggctgccatcatagccgccaatgaagcaggattgctagagaagaccaaaaaggatttcgcgtggaagagggagagtcatgtgctggtgactccgagtccgtggaacctggatttctcaatggatttgaggccagccaccagctggtcattgtatgtggtgatggccaccatgttagggccagtactggaacacgccattgtcaccaattatgctagcgtctcacttactgccatcacaaaccaggcaggaatactgctgtcaatggataagggcactcctttctggaatcttgactggagtgttgtcctgttgtgcgtgggcagctggtcggggatcaatggcactacactaatggttgcttccacaatgacagttttgcattttgccatgatactacctggcattcgtgccaaagcggcgagagaagcacagaatcgaacagcagctggggtgtcaaagaaccctcttattgatgggttaaacaccataaacatccagccgttgccggaaatggaccccatgtacgaaaggaaaatggggctatggatgctaatcgctgttgccggagccgcggtggtttttgacaagagaatgctccattacaccgagttcggagtattgggttcagctgctgtgagtcctctcattgaaggatacgcgtctgctgtttggaacacttccgtagcagccagtgtgtgcaacctaatgcgaggccattacatggcgggaatcccaatggcatactctctgatcagaaatctatccatgaaaggagttcctaggaggggattacaggccacccatacccttggtatggtttggaaacacaaattaaacgccatggacaaggcggcctttaacgcataccggaaggatggagtgacagaagtggatagggagccagcacgtgaagctatgaagaaaggagatttggtgagcggatgggcggtctctcgagggtcagccaagctgcgatggatgcacgagcgtggatacattcccctacaaggagttgtcattgacctcggatgtggaagaggggggtggagttactacgctgctgcacaacgccgggtgaccgctgtcaaagggctcacgaaaggcggaccagggcatgaggagccaatcaacgtccagtcatatggatggaacttagtgacgttccgtagtggagtggatgtctttcacaccgaagtccagccggctgacaccctgttgtgcgacataggagagtcttctgctgaccccgctgtcgaaaaagcgcgcacagtacaagtgttggtgaactttgaaagatggattagagagtcgcggtgtgagcatttttgttgcaaggtgcttggtccctactctcccgaagtgatggagcgcttagatcgtttaacaaagacatatggaggagcggtaattcgcaacccactatccaggaactccacgcatgagatgtactgggtgtcaggagctaagggtaatccagtcaatgctataacagccacctcacgtgtgctaatcgaacgcatgtacagaagacttggcaagagttactgggaagaagatgtgaatcttggtactgggacccgtgcagtttcatgtgccgcggagaagccagatctagcaaaaatcggaaggcgcattgagttgctgaagaaggagtataaagcatcatggttcgaggatccagagcatccctacaagacatggacataccatggttcctacgaaaccaagaccacaggcagctcgtctagtatgattaatggcgttgtcaaggagatcactcacccttgggataccaacccaagggttacaaccgtctgtatgaccgacaccactccttttggacagcagagagtattcaaggaaaaggtagataccaaggcacgtgagccatctcaagggacgcgggagatcatgagaatagtgagcaagtggctcacactatatattggtcggagcaagcgccctaggctgtgcacagcggatgaattcatagccaaagttaatgctgatgccgctctcggcacgatgttcgactcgcagggaaactgggcgaacgccaaagaagctgtgcgcgacccacggttttggcagttggtggccaaagagagggaacttcacctgcgtggacagtgtgccacgtgtgtttacaacatgatggggaagcgagagaaaaagctgacagagtttgggaagtcgaaggggagccgagcaatttggtttatgtggctaggagctaggttcttggagtttgaaagtttaggcttcctaaacgaggatcattggttgtcacgtgaaaactcaggaggtggagttgagggcattggattgcaataccttgggtatgtgttgaaagaaatggcactaattcccgggggcaagatgtacgccgatgacaccgctgggtgggacaccagaattactaacgctgaccttgaggatgagatggacatattgggacttatggacccgcatcacaaaaaactggcaaaaaatctgatggagttggcgtacaacaacaaggtggtcagagtgatgcgccctggtaaagggggaaaaacactaatggacatcattagccgcaaggaccagcggggaagtggacaagtggtcacctacccactcaacacgtggacgaatctcaaggtccaattgatccgtatggcagagtcagagggagtgttggaccccaaggagatcgatggaatcactgtcacgactcggaataacctggaaaaatggctcactagccaaggggctgagcgtctaaagcgcattgcagctagcggtgacgacgttgtggtaaaaccagtggatgagagattcgccaatgctctcacctatctaaacgacatggccaaaattaggaaggacatcagtgagtggaaaccatccgcggggtggttccactgggaagaagtgccattctgctcacaccattttcaccagttggtcctcaaggatgggcgcaccttagtggtcccatgccgtgaccaggatgaactaattggaagggcaagagtgtcacctggtgctggatggactatcagagaaactgcaggtctaagcaaggcctatgcccagatgtggcttctaatgcacttccaccggagggacctcagaatggcaggtttcgccatttgtagtgctgtccccagtgattgggtgcccacgggaaggacatcgtggtcactgcacgctaaaggggagtggatgaccactgaagacatgttagcagtttggaacagagtgtggattgaagacaatccccacatgtctaacaagactttagtgggatcatggcaagacatcccgtaccagaggaaatccctggacatccactgtggctcaatgatagggcagcggtctaggtcaacatgggctgctaacatacgaattagcattggacacgtgcgccgattgattggaaccacggaaaagtacttggattacatgcaggagcaggagcggttcaagattgctgaaccaacccgtctgggcaatgtgatctaaggatctacgaacgagaataagtagaagaacggaacgacagagtcaggcctcaaatgagccagcattaatgagagtaagtgctgctgcctgtgcctctccttaacacgtggtagcgccactcgtgtttcgttacctaatagcgctagagtcagacccaagtaggccagggctatggttgtaagccctgctgtctgtggcagccatccagtggtaatgcgtcgcaccactaaggattaatagacgtatattgggagggactggtgaggagcagcaagctcgagctgcatcacccactggtactatcggttagaggaaaccccctccaaaatgtagagcatcatatcgacacctgggaaagaccggagatacctcttgcttcacagcactcaatccacaaggcacagatcgccgaataattgtggattggggattgagaaacatcaagtatct

SEQ ID NO: 393 - protein, 3438 aa, Artificial Sequence
  synthetic
MVTKLRRPVKRAVDMMRRAVPRAAGPRRVLTRVSNTVKRNAGALRALLAYLLYQTFSGRKVGSGARSALKRFNKNDIVKMLLAFRRTLTNIITTMQRRVKGKKRRGVQDVPLLVLLLVGAGAMAATLRTVGDLTWLNVSTTDVGKWIRVENRHGKGECFVTATDVGTWCSDSVGYECPQIAPAYDPEDLDCYCRNTSTYVTYGRCKNGRSGRSRSKRAITIAPHGEAGLRVGSTKHWTSRATPQRYLMRVEKWVLRHPLPALVLVVLGWMMGRSHGQRAMYIVLMLLVAPSYGNQCLDVQSRDFVQGVSGGTWVDVVLDHDNCITIVADGKPSFDIRLSKMSMSKFAEYKRYCLQATMSDVTSIVACPGAGDAHNDKSKNHEYICKAVNNDRGWGNGCVLFGKGSMETCGKFECKKKMAGKLVARENVESVVTVHVHGATTVESHGNYSTQVGATQAGKATITPKASVATLNLNDFGSLEVDCSTDVGMDFGEIVVADMSGKWWIVNKDWFNELALPWSTASTTAEVWQARDRLVEFGWPHAAKQNIYDIGDQEGAVTAAIAQAPMAKWESDKVELISGILKCKVKLGNLKLRGVTYSMCAQTFTTETRPADTGHGTVAFKVKYVGTDVPCRVPLHIIDSDGGVAAGRVITAHPFVMKQNDYIILEVEPPFGDSKIEIGTGTTKLVEAWHRKGSSIGNAFTATYKGITKLTVLGEHAWDFNSLGGFGASLGKAVHTLFGGVFRVMFGGMGWLTKIFVGAVLVWLGLGAHDKTIATTMILVGSILMYMAVTVGALSEIGCSLDISRKEMKCGDGVFIFREAGMWKDGYAFHPSEPKSLAASVLKSWQSGVCGVRSTNRMEHAMWKQIENELNGILEENEAQLSVVVRESNGTFPRGERRMHVAEPLRYGWKTWGKTAISTVPLAKETFVVDGNDEGECPSQMRAWNSFQVEEFGTGLVKTKVFLDISTALTAQCDTKMLGAAIKGNRSVHGDPGLWMVSAEIDGTWQIIELTLAESRRCTWPDSHTVWGRNVQESELILPPSFGGPMTNMNKRKGYATQVGGPWNHVPLRVVFEECPGTTVSVEPNCTRRSDSVRSTTDSGKIITDWCCRSCTMPPLTYRTPDGCWYAMEIRPKNVKEESLIRSHVAAGVFKGIDDVSLGLLVMIIFLQEGLRRKLTATYIMWAALVVLIAGILGELTVRDVLRYLILVGTAFAESNNGGDLIHLALVAVFKIRPAFLFGFLFRSQWSPREGVLLASGALMLQIASECLHASAIMQVVDSLSMGWLMIRAIAVPGMTSKAMPLLCACIPAVTSLLAHSTRAGIITMAGMSLIAGSKGSSVKKHSPYMLALVVAGLGARPIGMLAMEAFSHLKGRRSWPAGEMMSAVGLTCALVGAISGASSQDFAGPLAAAALIIIAYAISGRSADVYLEKAGEISWSEDAKISGSSPRIDVCVTENGDFKLRHESEATWTRNCVLAACLVVAGVHPLGIPVAGLMWFGYVKSNKRGTVLWDIPSPQATSAPTVEDGCYRVMSRRLLGSTQLGVGIMLDSTFHTMWHITRGASIVSGEGRLDPYWADVKEDLVCYGGPWKIRNTWDGLSEVQLIAVAPKENPVNVQTMPGKFIVANGGEIGAVVLDYPPGTSGSPIVDQQGNVIGLYGNGVMINDQTYASAIAQAPAEVARTPTWFTDDMLRKGQLHVLDLHPGAGKTRKVLPEILKAAVEKRLRTLVLAPTRVVAKEMHEALTGLPVRYQTSAVAPNGSGGELIDVMCHATYTHRQLTPGRGVNYQLYIVDEAHFTDPASIAARGIIATRVRLGHAAAIFMTATPPGMSNPFPESNAHIEDEEREVPTKAWNAGYEWITDYGGKTVWFVPSIRMANTIAACLVRAGKTVIVLHSGSFNEEYQKTKSGNWDFVVTTDISEMGANFKASRVIDSRLSIKPMFSYAPSERVVIGSPRAVSPASAAQRRGRVGRDPRQLGDQYIYGGPVGEDSAEFVHWKEARILMDNVTVPGGLYPQFYEPEGGMCDAMDGAHRLTDAKREVFRDLMKKGELPVWLAYQVAQAGHAYTDRTWCYGGPADHQVYDDCGQTVDYRSLNGERRMLRPKWLDQRTYNDKTSLRLFTEFAEGRRRYSELMDVFGRMPQHMLDRTILAADTFKDVLTATPGSRVHRLALDNLPEATETMMVVGILSVSTLGVMLFLMSPKGMTRMTCGLVVIILATYFLWVSGMAGYQIAAMQLIAFILFVVLVPEPGSQRSVQDNTIAIILIVILSLAAIIAANEAGLLEKTKKDFAWKRESHVLVTPSPWNLDFSMDLRPATSWSLYVVMATMLGPVLEHAIVTNYASVSLTAITNQAGILLSMDKGTPFWNLDWSVVLLCVGSWSGINGTTLMVASTMTVLHFAMILPGIRAKAAREAQNRTAAGVSKNPLIDGLNTINIQPLPEMDPMYERKMGLWMLIAVAGAAVVFDKRMLHYTEFGVLGSAAVSPLIEGYASAVWNTSVAASVCNLMRGHYMAGIPMAYSLIRNLSMKGVPRRGLQATHTLGMVWKHKLNAMDKAAFNAYRKDGVTEVDREPAREAMKKGDLVSGWAVSRGSAKLRWMHERGYIPLQGVVIDLGCGRGGWSYYAAAQRRVTAVKGLTKGGPGHEEPINVQSYGWNLVTFRSGVDVFHTEVQPADTLLCDIGESSADPAVEKARTVQVLVNFERWIRESRCEHFCCKVLGPYSPEVMERLDRLTKTYGGAVIRNPLSRNSTHEMYWVSGAKGNPVNAITATSRVLIERMYRRLGKSYWEEDVNLGTGTRAVSCAAEKPDLAKIGRRIELLKKEYKASWFEDPEHPYKTWTYHGSYETKTTGSSSSMINGVVKEITHPWDTNPRVTTVCMTDTTPFGQQRVFKEKVDTKAREPSQGTREIMRIVSKWLTLYIGRSKRPRLCTADEFIAKVNADAALGTMFDSQGNWANAKEAVRDPRFWQLVAKERELHLRGQCATCVYNMMGKREKKLTEFGKSKGSRAIWFMWLGARFLEFESLGFLNEDHWLSRENSGGGVEGIGLQYLGYVLKEMALIPGGKMYADDTAGWDTRITNADLEDEMDILGLMDPHHKKLAKNLMELAYNNKVVRVMRPGKGGKTLMDIISRKDQRGSGQVVTYPLNTWTNLKVQLIRMAESEGVLDPKEIDGITVTTRNNLEKWLTSQGAERLKRIAASGDDVVVKPVDERFANALTYLNDMAKIRKDISEWKPSAGWFHWEEVPFCSHHFHQLVLKDGRTLVVPCRDQDELIGRARVSPGAGWTIRETAGLSKAYAQMWLLMHFHRRDLRMAGFAICSAVPSDWVPTGRTSWSLHAKGEWMTTEDMLAVWNRVWIEDNPHMSNKTLVGSWQDIPYQRKSLDIHCGSMIGQRSRSTWAANIRISIGHVRRLIGTTEKYLDYMQEQERFKIAEPTRLGNVI

SEQ ID NO: 394 - DNA, 11797 bp, Artificial Sequence
  synthetic
agtatattttgcgtgtgcgtttcaaaacacagattgtattgaaagtacgtaagagtataacacgttggaataaagttttggatcaagaggaaaatcatggttacaaaactcaggaggcccgttaaacgggccgtcgatatgatgaggcgcgcggtaccccgcgccgcaggaccccggcgggtcctaactagggtatcaaataccgtgaagcgtaacgcaggcgctcttagagctcttctggcttatctgctgtaccagacattctctgggcggaaagttggtagtggtgctcggagcgcccttaagcgcttcaacaaaaatgacattgtgaaaatgttgctggcgttcagacggacattgacaaacatcatcacaaccatgcagcgtcgtgtgaaaggaaagaaacgtcgtggcgttcaagatgtgccgctattggtcttgctgctcgttggagcaggagcgatggctttccatctgaccacccgagggggagagccgcacatgatagttagcaagcaggaaagaggaaagtcacttttgtttaagacctctgcaggtgtcaacatgtgtacccttattgcaatggatttgggagagttatgtgaagacacaatgacctacaaatgcccccggatcactgaaacggaaccagatgacgttgactgctggtgcaacgccacggagacatgggtgacttatggaacatgttctcaaactggtgaacaccgacgagacaaacgttccgtcgcactggcaccacacgtagggcttggtctagaaacaagaaccgaaacgtggatgtcctctgaaggcgcttggaaacaaatacaaaaagtggagacctgggctctgagacacccaggattcacggtgatagctctttttctagcacatgccataggaacatccatcacccagaaaggaattattttcattttgctgatgctggtaactccatccatggccatgcggtgcgtgggaataggcaacagagacttcgtggaaggactgtcaggagctacgtgggtggatgtggtactggagcatggaagttgtgttactaccatggcaaaagacaaaccaacactggatattgaactcttaaaaacggaggtcacaaacccagccgtcctgcgcaaactgtgcattgaagccaaaatatcaaataccaccaccgattcgagatgtccaacacaaggagaagccacgctggtggaagaacaagacacgaactttgtgtgtcgacgaacgttcgtggacagaggctggggcaatggttgtgggctattcggaaaaggcagcttaataacatgtgctaagtttaagtgtgtgacaaaactggaaggaaagatagtccaatatgaaaatttaaaatattcagtgatagtcaccgtccacactggagaccagcaccaagttggaaatgagactacagaacatggaacaactgcaaccataacacctcaagctcccacgtcggaaatacagctgacagactacggagctctaacactggactgttcacccagaacagggctagactttaatgagatggtgttgttgacaatgaaagaaaaatcatggctcgtccacaaacaatggtttctagacttaccgctgccttggacctcaggggcttcaacatcccaagagacttggaatagacaagacttgctggtcacattcaagacagctcatgcaaagaagcaggaagtagttgtactaggatcacaagaaggagcgatgcacactgcgttgactggagcgacagaaatccaaacgtctggaacgacaacaattttcgcaggacacctgaaatgcagactgaaaatggataaactgactttaaaaggggtatcatatgtaatgtgcacaggctcattcaagctagaaaaggaagtggctgagacccaacatggaaccgttctagtgcaggttaagtacgaaggaacagatgcaccatgtaagatccccttctcatcccaagatgagaggggagtaatccagaatgggagattgataacagccaaccccatagtcactgacaaagaaaaaccagttaacatcgaggcggagccaccttttggtgagagctacatcgtggtaggagcaggtgaaaaagctttgaaactaagctggttcaagaagggaagcagtatagggaaaatgtttgaagcaactgcccgtggagcacgaaggatggccatcctgggagacactgcatgggacttcggttctataggaggagtgttcacgtccgtgggaaaactggtacaccagatttttggaactgcgtatggagtcttgttcagcggtgtttcttggaccatgaaaataggaatagggattctgctgacatggctagggttaaattcaaggagcacatccctttcaatgacgtgtatcgcagttggcatggttacactgtacctaggagtcatggttcaggcgctatcggaaataggatgcagtctggacattagccgaaaagaaatgaagtgtggggacggagtcttcatcttcagagaggcaggcatgtggaaggatgggtatgcgttccacccttccgaacccaaatctctggccgcgtcagttctcaagagttggcagtctggagtgtgcggcgtgcgctccacgaacagaatggaacatgccatgtggaaacagattgaaaatgaattgaacggcattctagaagagaatgaggcgcaactcagcgtggttgtgcgagagtctaacgggaccttcccgagaggagagcgccgcatgcacgtggccgaacctctgcgctatggatggaagacctggggaaagaccgcaatttcgacggtgccgctcgctaaagaaacgtttgtggtagatggcaatgatgaaggagaatgtccctctcaaatgcgtgcttggaattccttccaagttgaagagttcggaactgggctggtgaaaaccaaagtgttcttggacatatccactgctctcaccgcccaatgtgacaccaaaatgctgggcgctgccataaaggggaataggtctgttcatggagatccaggtctctggatggtctcagctgaaatcgatgggacatggcagataatagagctcacattggcagagagcaggcgttgcacatggccagactctcacaccgtgtggggtaggaatgtccaggagagtgagttgatactgccaccgtctttcggaggaccgatgaccaacatgaacaagcgtaaaggctacgcgacccaagtgggaggaccatggaaccatgttccactacgagtagtttttgaagagtgtccgggaaccactgtatctgttgaaccaaactgcaccaggagatcggattcagtgcgatccacaactgatagcggcaagattataaccgactggtgttgtcgttcctgtacaatgcctcccctaacgtaccgaacccccgatggatgctggtatgcaatggaaatcaggcccaagaatgttaaagaggagagtctgatccgttcgcatgtggcggcaggtgtgtttaaaggcattgacgacgtgtcactggggctgttagtaatgataattttcctgcaggaaggtttgagaagaaagttaactgcaacgtatatcatgtgggctgctcttgtggtcctcattgcaggaatcctaggggaactcacagtgagggatgtgctcaggtatctcatcctagtcggcactgcattcgctgagagtaataatggaggagatttaatacatctggccctagtggcggtcttcaagattaggccggcattcttatttggattcttgttcaggagtcagtggtcccccagagaaggtgtgttgctggcatctggagcgctgatgctgcagattgcaagtgagtgcttgcacgcatcggcgattatgcaggttgtcgattccttgagcatggggtggttgatgatcagagccattgctgtacctggtatgacctcaaaagccatgccactgctgtgtgcctgcattcctgcagttacgagcctactggcccactcaaccagagccggtataatcaccatggccggcatgtcgcttattgcaggaagtaagggatcatcagttaaaaaacacagtccatacatgcttgccctcgtggtggcaggcctcggagcccgtcccataggaatgttggcgatggaagccttctctcacctgaagggccggagatcatggccggctggtgagatgatgtcagccgttgggctgacatgtgcgctagtgggagctatcagtggcgcatcatctcaggacttcgccggacctctagcagcagcggctctaattattattgcatatgccattagtggacgctcagctgatgtataccttgagaaagccggtgagatatcctggagtgaggacgctaaaatatccggatcaagcccgcgcattgatgtgtgcgttaccgaaaatggagatttcaaattgcgtcatgagagtgaagcaacctggacccggaattgtgtcttggctgcttgcttagtcgtagccggagtgcacccactggggattccagtagcagggttgatgtggtttggatatgtgaaatcaaacaagcgggggactgtgttgtgggacattccctcaccacaggcaacatcagctccaacggtggaagatggatgctaccgcgttatgtcacgtagactgcttggcagcactcagcttggtgttgggatcatgctagactctacatttcacacaatgtggcacataacccgaggagcatctattgttagtggtgaagggcgtcttgacccatattgggctgacgttaaggaagacctggtctgttacggagggccatggaaaatccgcaacacatgggatggactctcagaagttcagctgatagcggtggccccaaaagagaatcccgtgaacgtccaaacaatgccaggaaagttcattgtggcgaatggaggtgagataggagccgttgtgctcgactatcctcctggaacttctggttcacccatcgtggatcagcagggtaatgtcataggactgtatggcaacggggttatgatcaatgaccaaacgtatgcgagtgccattgcgcaagctccagctgaagttgcgcgcaccccaacctggttcactgatgatatgttgcgaaagggacaattgcatgtgctagacttgcaccctggagcgggaaaaacccgcaaggtcctgcctgagattctcaaagcagcggtggagaaacggctacgcacgttggtcctggccccaaccagagttgtggcaaaggaaatgcatgaagcattgaccgggctgccggtacgctaccagacatcagcagtggcaccaaatggttctggaggagaattgattgatgtcatgtgccatgcaacatacacacaccgccagctgacaccgggacggggggtcaactaccagttatacatagtggatgaggcacattttacagatcccgcttccatcgcagctcgcggcatcattgcgactagggtgcgattgggacatgccgcagcaatcttcatgacggccacacccccgggaatgtcaaacccattcccggagtctaatgctcacattgaagacgaagagcgggaggtacccaccaaagcttggaacgctggatatgagtggataacagactatgggggaaaaaccgtgtggttcgtgccttccatccggatggcgaacaccatagctgcatgcttggtacgagcaggcaagacagtcattgtactgcacagtggctctttcaatgaagaatatcaaaaaaccaagtctggcaattgggatttcgttgtgacgaccgacatctcagaaatgggggccaatttcaaagcctctagggtcatagactctagactgtccataaaaccgatgttttcctacgctcccagtgagcgagtggttattggctcacctagagcggtttctccagccagcgcagcacagcgccgagggagagtcgggagagaccctcgtcaactgggcgaccagtatatctatggtggaccagtaggagaagactcggccgagttcgttcattggaaggaagcaaggatcctcatggataatgtaactgtccctgggggcttgtatccacaattctacgaaccagagggtggaatgtgtgacgccatggatggagctcaccgactgaccgatgctaagagagaagtgttccgagacctcatgaagaaaggggaacttcctgtatggttagcataccaggtggcccaggctgggcatgcgtacactgacagaacttggtgctatggggggccggcggatcatcaagtgtatgatgattgcggccaaaccgtggattacaggtcccttaatggagagaggcgtatgctacgtcccaagtggcttgatcagcgcacctacaacgacaaaacatccttaaggctcttcacggaatttgcagagggacgccgccgatattcggaactaatggacgtgtttggaagaatgccccaacacatgttggacaggaccatcttggctgcagacacgtttaaagatgtcctgacagcaacaccgggatctcgtgtgcaccgtttagcactggacaatttacccgaagctacagaaactatgatggtagtgggaatcctgagtgtctcgaccctaggcgttatgctatttctgatgtcacccaagggcatgacccggatgacctgcggacttgtggtgatcatcctggcgacgtattttctatgggtgtcaggaatggccggctaccagatagcagcaatgcaactcatcgcgttcattctgtttgtggtcttggtgccagagccagggtcacagagatcagtgcaagacaacaccatagcgataattctcatagtcatcctgtcgttggctgccatcatagccgccaatgaagcaggattgctagagaagaccaaaaaggatttcgcgtggaagagggagagtcatgtgctggtgactccgagtccgtggaacctggatttctcaatggatttgaggccagccaccagctggtcattgtatgtggtgatggccaccatgttagggccagtactggaacacgccattgtcaccaattatgctagcgtctcacttactgccatcacaaaccaggcaggaatactgctgtcaatggataagggcactcctttctggaatcttgactggagtgttgtcctgttgtgcgtgggcagctggtcggggatcaatggcactacactaatggttgcttccacaatgacagttttgcattttgccatgatactacctggcattcgtgccaaagcggcgagagaagcacagaatcgaacagcagctggggtgtcaaagaaccctcttattgatgggttaaacaccataaacatccagccgttgccggaaatggaccccatgtacgaaaggaaaatggggctatggatgctaatcgctgttgccggagccgcggtggtttttgacaagagaatgctccattacaccgagttcggagtattgggttcagctgctgtgagtcctctcattgaaggatacgcgtctgctgtttggaacacttccgtagcagccagtgtgtgcaacctaatgcgaggccattacatggcgggaatcccaatggcatactctctgatcagaaatctatccatgaaaggagttcctaggaggggattacaggccacccatacccttggtatggtttggaaacacaaattaaacgccatggacaaggcggcctttaacgcataccggaaggatggagtgacagaagtggatagggagccagcacgtgaagctatgaagaaaggagatttggtgagcggatgggcggtctctcgagggtcagccaagctgcgatggatgcacgagcgtggatacattcccctacaaggagttgtcattgacctcggatgtggaagaggggggtggagttactacgctgctgcacaacgccgggtgaccgctgtcaaagggctcacgaaaggcggaccagggcatgaggagccaatcaacgtccagtcatatggatggaacttagtgacgttccgtagtggagtggatgtctttcacaccgaagtccagccggctgacaccctgttgtgcgacataggagagtcttctgctgaccccgctgtcgaaaaagcgcgcacagtacaagtgttggtgaactttgaaagatggattagagagtcgcggtgtgagcatttttgttgcaaggtgcttggtccctactctcccgaagtgatggagcgcttagatcgtttaacaaagacatatggaggagcggtaattcgcaacccactatccaggaactccacgcatgagatgtactgggtgtcaggagctaagggtaatccagtcaatgctataacagccacctcacgtgtgctaatcgaacgcatgtacagaagacttggcaagagttactgggaagaagatgtgaatcttggtactgggacccgtgcagtttcatgtgccgcggagaagccagatctagcaaaaatcggaaggcgcattgagttgctgaagaaggagtataaagcatcatggttcgaggatccagagcatccctacaagacatggacataccatggttcctacgaaaccaagaccacaggcagctcgtctagtatgattaatggcgttgtcaaggagatcactcacccttgggataccaacccaagggttacaaccgtctgtatgaccgacaccactccttttggacagcagagagtattcaaggaaaaggtagataccaaggcacgtgagccatctcaagggacgcgggagatcatgagaatagtgagcaagtggctcacactatatattggtcggagcaagcgccctaggctgtgcacagcggatgaattcatagccaaagttaatgctgatgccgctctcggcacgatgttcgactcgcagggaaactgggcgaacgccaaagaagctgtgcgcgacccacggttttggcagttggtggccaaagagagggaacttcacctgcgtggacagtgtgccacgtgtgtttacaacatgatggggaagcgagagaaaaagctgacagagtttgggaagtcgaaggggagccgagcaatttggtttatgtggctaggagctaggttcttggagtttgaaagtttaggcttcctaaacgaggatcattggttgtcacgtgaaaactcaggaggtggagttgagggcattggattgcaataccttgggtatgtgttgaaagaaatggcactaattcccgggggcaagatgtacgccgatgacaccgctgggtgggacaccagaattactaacgctgaccttgaggatgagatggacatattgggacttatggacccgcatcacaaaaaactggcaaaaaatctgatggagttggcgtacaacaacaaggtggtcagagtgatgcgccctggtaaagggggaaaaacactaatggacatcattagccgcaaggaccagcggggaagtggacaagtggtcacctacccactcaacacgtggacgaatctcaaggtccaattgatccgtatggcagagtcagagggagtgttggaccccaaggagatcgatggaatcactgtcacgactcggaataacctggaaaaatggctcactagccaaggggctgagcgtctaaagcgcattgcagctagcggtgacgacgttgtggtaaaaccagtggatgagagattcgccaatgctctcacctatctaaacgacatggccaaaattaggaaggacatcagtgagtggaaaccatccgcggggtggttccactgggaagaagtgccattctgctcacaccattttcaccagttggtcctcaaggatgggcgcaccttagtggtcccatgccgtgaccaggatgaactaattggaagggcaagagtgtcacctggtgctggatggactatcagagaaactgcaggtctaagcaaggcctatgcccagatgtggcttctaatgcacttccaccggagggacctcagaatggcaggtttcgccatttgtagtgctgtccccagtgattgggtgcccacgggaaggacatcgtggtcactgcacgctaaaggggagtggatgaccactgaagacatgttagcagtttggaacagagtgtggattgaagacaatccccacatgtctaacaagactttagtgggatcatggcaagacatcccgtaccagaggaaatccctggacatccactgtggctcaatgatagggcagcggtctaggtcaacatgggctgctaacatacgaattagcattggacacgtgcgccgattgattggaaccacggaaaagtacttggattacatgcaggagcaggagcggttcaagattgctgaaccaacccgtctgggcaatgtgatctaaggatctacgaacgagaataagtagaagaacggaacgacagagtcaggcctcaaatgagccagcattaatgagagtaagtgctgctgcctgtgcctctccttaacacgtggtagcgccactcgtgtttcgttacctaatagcgctagagtcagacccaagtaggccagggctatggttgtaagccctgctgtctgtggcagccatccagtggtaatgcgtcgcaccactaaggattaatagacgtatattgggagggactggtgaggagcagcaagctcgagctgcatcacccactggtactatcggttagaggaaaccccctccaaaatgtagagcatcatatcgacacctgggaaagaccggagatacctcttgcttcacagcactcaatccacaaggcacagatcgccgaataattgtggattggggattgagaaacatcaagtatctgggtcggcatggcatctccacctcctcgcggtccgacctgggcatccgaaggaggacgtcgtccactcggatggctaagggagagccacttttctctcgattctctatcggaatctagggagctcggatccagacatgataagatacattgatgagtttggacaaaccacaactagaatgcagtgaaaaaaatgctttatttgtgaaatttgtgatgctattgctttatttgtaaccattataagctgcaataaacaagttaacaacaacaattgctcgagggggggcccggtaccttgaagctgtccctgatggtcgtcatctacctgcctggacagcatggcctgcaacgcgggcatcccgatgccgccggaagcgagaagaatcataatggggaaggccatccagcctcgcgtcggcgcttaaggatcatgatgataaacaatgtatggtgctaatgttgcttcaacaacaattctgttgaactgtgttttcatgtttgccaacaagcacctttatactcggtggcctccccaccaccaacttttttgcactgcaaaaaaacacgcttttgcacgcgggcccatacatagtacaaactctacgtttcgtagactattttacataaatagtctacaccgttgtatacgctccaaatacactaccacacattgaacctttttgcagtgcaaaaaagtacgtgtcggcagtcacgtaggccggccttatcgggtcgcgtcctgtcacgtacgaatcacattatcggaccggacgagtgttgtcttatcgtgacaggacgccagcttcctgtgttgctaaccgcagccggacgcaactccttatcggaacaggacgcgcctccatatcagccgcgcgttatctcatgcgcgtgaccggacacgaggcgcccgtcccgcttatcgcgcctataaatacagcccgcaacgatctggtaaac

SEQ ID NO: 395 - protein, 3430 aa, Artificial Sequence
  synthetic
MVTKLRRPVKRAVDMMRRAVPRAAGPRRVLTRVSNTVKRNAGALRALLAYLLYQTFSGRKVGSGARSALKRFNKNDIVKMLLAFRRTLTNIITTMQRRVKGKKRRGVQDVPLLVLLLVGAGAMAFHLTTRGGEPHMIVSKQERGKSLLFKTSAGVNMCTLIAMDLGELCEDTMTYKCPRITETEPDDVDCWCNATETWVTYGTCSQTGEHRRDKRSVALAPHVGLGLETRTETWMSSEGAWKQIQKVETWALRHPGFTVIALFLAHAIGTSITQKGIIFILLMLVTPSMAMRCVGIGNRDFVEGLSGATWVDVVLEHGSCVTTMAKDKPTLDIELLKTEVTNPAVLRKLCIEAKISNTTTDSRCPTQGEATLVEEQDTNFVCRRTFVDRGWGNGCGLFGKGSLITCAKFKCVTKLEGKIVQYENLKYSVIVTVHTGDQHQVGNETTEHGTTATITPQAPTSEIQLTDYGALTLDCSPRTGLDFNEMVLLTMKEKSWLVHKQWFLDLPLPWTSGASTSQETWNRQDLLVTFKTAHAKKQEVVVLGSQEGAMHTALTGATEIQTSGTTTIFAGHLKCRLKMDKLTLKGVSYVMCTGSFKLEKEVAETQHGTVLVQVKYEGTDAPCKIPFSSQDERGVIQNGRLITANPIVTDKEKPVNIEAEPPFGESYIVVGAGEKALKLSWFKKGSSIGKMFEATARGARRMAILGDTAWDFGSIGGVFTSVGKLVHQIFGTAYGVLFSGVSWTMKIGIGILLTWLGLNSRSTSLSMTCIAVGMVTLYLGVMVQALSEIGCSLDISRKEMKCGDGVFIFREAGMWKDGYAFHPSEPKSLAASVLKSWQSGVCGVRSTNRMEHAMWKQIENELNGILEENEAQLSVVVRESNGTFPRGERRMHVAEPLRYGWKTWGKTAISTVPLAKETFVVDGNDEGECPSQMRAWNSFQVEEFGTGLVKTKVFLDISTALTAQCDTKMLGAAIKGNRSVHGDPGLWMVSAEIDGTWQIIELTLAESRRCTWPDSHTVWGRNVQESELILPPSFGGPMTNMNKRKGYATQVGGPWNHVPLRVVFEECPGTTVSVEPNCTRRSDSVRSTTDSGKIITDWCCRSCTMPPLTYRTPDGCWYAMEIRPKNVKEESLIRSHVAAGVFKGIDDVSLGLLVMIIFLQEGLRRKLTATYIMWAALVVLIAGILGELTVRDVLRYLILVGTAFAESNNGGDLIHLALVAVFKIRPAFLFGFLFRSQWSPREGVLLASGALMLQIASECLHASAIMQVVDSLSMGWLMIRAIAVPGMTSKAMPLLCACIPAVTSLLAHSTRAGIITMAGMSLIAGSKGSSVKKHSPYMLALVVAGLGARPIGMLAMEAFSHLKGRRSWPAGEMMSAVGLTCALVGAISGASSQDFAGPLAAAALIIIAYAISGRSADVYLEKAGEISWSEDAKISGSSPRIDVCVTENGDFKLRHESEATWTRNCVLAACLVVAGVHPLGIPVAGLMWFGYVKSNKRGTVLWDIPSPQATSAPTVEDGCYRVMSRRLLGSTQLGVGIMLDSTFHTMWHITRGASIVSGEGRLDPYWADVKEDLVCYGGPWKIRNTWDGLSEVQLIAVAPKENPVNVQTMPGKFIVANGGEIGAVVLDYPPGTSGSPIVDQQGNVIGLYGNGVMINDQTYASAIAQAPAEVARTPTWFTDDMLRKGQLHVLDLHPGAGKTRKVLPEILKAAVEKRLRTLVLAPTRVVAKEMHEALTGLPVRYQTSAVAPNGSGGELIDVMCHATYTHRQLTPGRGVNYQLYIVDEAHFTDPASIAARGIIATRVRLGHAAAIFMTATPPGMSNPFPESNAHIEDEEREVPTKAWNAGYEWITDYGGKTVWFVPSIRMANTIAACLVRAGKTVIVLHSGSFNEEYQKTKSGNWDFVVTTDISEMGANFKASRVIDSRLSIKPMFSYAPSERVVIGSPRAVSPASAAQRRGRVGRDPRQLGDQYIYGGPVGEDSAEFVHWKEARILMDNVTVPGGLYPQFYEPEGGMCDAMDGAHRLTDAKREVFRDLMKKGELPVWLAYQVAQAGHAYTDRTWCYGGPADHQVYDDCGQTVDYRSLNGERRMLRPKWLDQRTYNDKTSLRLFTEFAEGRRRYSELMDVFGRMPQHMLDRTILAADTFKDVLTATPGSRVHRLALDNLPEATETMMVVGILSVSTLGVMLFLMSPKGMTRMTCGLVVIILATYFLWVSGMAGYQIAAMQLIAFILFVVLVPEPGSQRSVQDNTIAIILIVILSLAAIIAANEAGLLEKTKKDFAWKRESHVLVTPSPWNLDFSMDLRPATSWSLYVVMATMLGPVLEHAIVTNYASVSLTAITNQAGILLSMDKGTPFWNLDWSVVLLCVGSWSGINGTTLMVASTMTVLHFAMILPGIRAKAAREAQNRTAAGVSKNPLIDGLNTINIQPLPEMDPMYERKMGLWMLIAVAGAAVVFDKRMLHYTEFGVLGSAAVSPLIEGYASAVWNTSVAASVCNLMRGHYMAGIPMAYSLIRNLSMKGVPRRGLQATHTLGMVWKHKLNAMDKAAFNAYRKDGVTEVDREPAREAMKKGDLVSGWAVSRGSAKLRWMHERGYIPLQGVVIDLGCGRGGWSYYAAAQRRVTAVKGLTKGGPGHEEPINVQSYGWNLVTFRSGVDVFHTEVQPADTLLCDIGESSADPAVEKARTVQVLVNFERWIRESRCEHFCCKVLGPYSPEVMERLDRLTKTYGGAVIRNPLSRNSTHEMYWVSGAKGNPVNAITATSRVLIERMYRRLGKSYWEEDVNLGTGTRAVSCAAEKPDLAKIGRRIELLKKEYKASWFEDPEHPYKTWTYHGSYETKTTGSSSSMINGVVKEITHPWDTNPRVTTVCMTDTTPFGQQRVFKEKVDTKAREPSQGTREIMRIVSKWLTLYIGRSKRPRLCTADEFIAKVNADAALGTMFDSQGNWANAKEAVRDPRFWQLVAKERELHLRGQCATCVYNMMGKREKKLTEFGKSKGSRAIWFMWLGARFLEFESLGFLNEDHWLSRENSGGGVEGIGLQYLGYVLKEMALIPGGKMYADDTAGWDTRITNADLEDEMDILGLMDPHHKKLAKNLMELAYNNKVVRVMRPGKGGKTLMDIISRKDQRGSGQVVTYPLNTWTNLKVQLIRMAESEGVLDPKEIDGITVTTRNNLEKWLTSQGAERLKRIAASGDDVVVKPVDERFANALTYLNDMAKIRKDISEWKPSAGWFHWEEVPFCSHHFHQLVLKDGRTLVVPCRDQDELIGRARVSPGAGWTIRETAGLSKAYAQMWLLMHFHRRDLRMAGFAICSAVPSDWVPTGRTSWSLHAKGEWMTTEDMLAVWNRVWIEDNPHMSNKTLVGSWQDIPYQRKSLDIHCGSMIGQRSRSTWAANIRISIGHVRRLIGTTEKYLDYMQEQERFKIAEPTRLGNVI

SEQ ID NO: 396 - DNA, 11821 bp, Artificial Sequence; identical to SEQ ID NO: 392
  synthetic

SEQ ID NO: 397 - protein, 3433 aa, Artificial Sequence
  synthetic
MSKKPGGPGKSRAVNMLKRGMPRVLSLIGLKRAMLSLIDGKGPIRFVLALLAFFRFTAIAPTRAVLDRWRGVNKQTAMKHLLSFKKELGTLTSAINRRSSKQKKRGGKTGIAVMIGLIASVGAVTLSNFQGKVMMTVNATDVTDVITIPTAAGKNLCIVRAMDVGYMCDDTITYECPVLSAGNDPEDIDCWCTKSAVYVRYGRCTKTRHSRRSRRSLTVQTHGESTLANKKGAWMDSTKATRYLVKTESWILRNPGYALVAAVIGWMLGSNTMQRVVFVVLLLLVAPAYSFNCLGMSNRDFLEGVSGATWVDLVLEGDSCVTIMSKDKPTIDVKMMNMEAANLAEVRSYCYLATVSDLSTKAACPTMGEAHNDKRADPAFVCRQGVVDRGWGNGCGLFGKGSIDTCAKFACSTKAIGRTILKENIKYEVAIFVHGPTTVESHGNYSTQVGATQAGRLSITPAAPSYTLKLGEYGEVTVDCEPRSGIDTNAYYVMTVGTKTFLVHREWFMDLNLPWSSAGSTVWRNRETLMEFEEPHATKQSVIALGSQEGALHQALAGAIPVEFSSNTVKLTSGHLKCRVKMEKLQLKGTTYGVCSKAFKFLGTPADTGHGTVVLELQYTGTDGPCKVPISSVASLNDLTPVGRLVTVNPFVSVATANAKVLIELEPPFGDSYIVVGRGEQQINHHWHKSGSSIGKAFTTTLKGAQRLAALGDTAWDFGSVGGVFTSVGKAVHQVFGGAFRSLFGGMSWITQGLLGALLLWMGINARDRSIALTFLAVGGVLLFLSVNVHADTGCAIDISRQELRCGSGVFIHNDVEAWMDRYKYYPETPQGLAKIIQKAHKEGVCGLRSVSRLEHQMWEAVKDELNTLLKENGVDLSVVVEKQEGMYKSAPKRLTATTEKLEIGWKAWGKSILFAPELANNTFVVDGPETKECPTQNRAWNSLEVEDFGFGLTSTRMFLKVRESNTTECDSKIIGTAVKNNLAIHSDLSYWIESRLNDTWKLERAVLGEVKSCTWPETHTLWGDGILESDLIIPVTLAGPRSNHNRRPGYKTQNQGPWDEGRVEIDFDYCPGTTVTLSESCGHRGPATRTTTESGKLITDWCCRSCTLPPLRYQTDSGCWYGMEIRPQRHDEKTLVQSQVNAYNADMIDPFQLGLLVVFLATQEVLRKRWTAKISMPAILIALLVLVFGGITYTDVLRYVILVGAAFAESNSGGDVVHLALMATFKIQPVFMVASFLKARWTNQENILLMLAAVFFQMAYHDARQILLWEIPDVLNSLAVAWMILRAITFTTTSNVVVPLLALLTPGLRCLNLDVYRILLLMVGIGSLIREKRSAAAKKKGASLLCLALASTGLFNPMILAAGLIACDPNRKRGWPATEVMTAVGLMFAIVGGLAELDIDSMAIPMTIAGLMFAAFVISGKSTDMWIERTADISWESDAEITGSSERVDVRLDDDGNFQLMNDPGAPWKIWMLRMVCLAISAYTPWAILPSVVGFWITLQYTKRGGVLWDTPSPKEYKKGDTTTGVYRIMTRGLLGSYQAGAGVMVEGVFHTLWHTTKGAALMSGEGRLDPYWGSVKEDRLCYGGPWKLQHKWNGQDEVQMIVVEPGKNVKNVQTKPGVFKTPEGEIGAVTLDFPTGTSGSPIVDKNGDVIGLYGNGVIMPNGSYISAIVQGERMDEPIPAGFEPEMLRKKQITVLDLHPGAGKTRRILPQIIKEAINRRLRTAVLAPTRVVAAEMAEALRGLPIRYQTSAVPREHNGNEIVDVMCHATLTHRLMSPHRVPNYNLFVMDEAHFTDPASIAARGYISTKVELGEAAAIFMTATPPGTSDPFPESNSPISDLQTEIPDRAWNSGYEWITEYTGKTVWFVPSVKMGNEIALCLQRAGKKVVQLNRKSYETEYPKCKNDDWDFVITTDISEMGANFKASRVIDSRKSVKPTIITEGEGRVILGEPSAVTAASAAQRRGRIGRNPSQVGDEYCYGGHTNEDDSNFAHWTEARIMLDNINMPNGLIAQFYQPEREKVYTMDGEYRLRGEERKNFLELLRTADLPVWLAYKVAAAGVSYHDRRWCFDGPRTNTILEDNNEVEVITKLGERKILRPRWIDARVYSDHQALKAFKDFASGKRSQIGLIEVLGKMPEHFMGKTWEALDTMYVVATAEKGGRAHRMALEELPDALQTIALIALLSVMTMGVFFLLMQRKGIGKIGLGGAVLGVATFFCWMAEVPGTKIAGMLLLSLLLMIVLIPEPEKQRSQTDNQLAVFLICVMTLVSAVAANEMGWLDKTKSDISSLFGQRIEVKENFSMGEFLLDLRPATAWSLYAVTTAVLTPLLKHLITSDYINTSLTSINVQASALFTLARGFPFVDVGVSALLLAAGCWGQVTLTVTVTAATLLFCHYAYMVPGWQAEAMRSAQRRTAAGIMKNAVVDGIVATDVPELERTTPIMQKKVGQIMLILVSLAAVVVNPSVKTVREAGILITAAAVTLWENGASSVWNATTAIGLCHIMRGGWLSCLSITWTLIKNMEKPGLKRGGAKGRTLGEVWKERLNQMTKEEFTRYRKEAIIEVDRSAAKHARKEGNVTGGHPVSRGTAKLRWLVERRFLEPVGKVIDLGCGRGGWCYYMATQKRVQEVRGYTKGGPGHEEPQLVQSYGWNIVTMKSGVDVFYRPSECCDTLLCDIGESSSSAEVEEHRTIRVLEMVEDWLHRGPREFCVKVLCPYMPKVIEKMELLQRRYGGGLVRNPLSRNSTHEMYWVSRASGNVVHSVNMTSQVLLGRMEKRTWKGPQYEEDVNLGSGTRAVGKPLLNSDTSKIKNRIERLRREYSSTWHHDENHPYRTWNYHGSYDVKPTGSASSLVNGVVRLLSKPWDTITNVTTMAMTDTTPFGQQRVFKEKVDTKAPEPPEGVKYVLNETTNWLWAFLAREKRPRMCSREEFIRKVNSNAALGAMFEEQNQWRSAREAVEDPKFWEMVDEEREAHLRGECHTCIYNMMGKREKKPGEFGKAKGSRAIWFMWLGARFLEFEALGFLNEDHWLGRKNSGGGVEGLGLQKLGYILREVGTRPGGKIYADDTAGWDTRITRADLENEAKVLELLDGEHRRLARAIIELTYRHKVVKVMRPAADGRTVMDVISREDQRGSGQVVTYALNTFTNLAVQLVRMMEGEGVIGPDDVEKLTKGKGPKVRTWLFENGEERLSRMAVSGDDCVVKPLDDRFATSLHFLNAMSKVRKDIQEWKPSTGWYDWQQVPFCSNHFTELIMKDGRTLVVPCRGQDELVGRARISPGAGWNVRDTACLAKSYAQMWLLLYFHRRDLRLMANAICSAVPVNWVPTGRTTWSIHAGGEWMTTEDMLEVWNRVWIEENEWMEDKTPVEKWSDVPYSGKREDIWCGSLIGTRARATWAENIQVAINQVRAIIGDEKYVDYMSSLKRYEDTTLVEDTVL

SEQ ID NO: 398 - DNA, 11927 bp, Artificial Sequence
  synthetic
gcccggtaccttgaagctgtccctgatggtcgtcatctacctgcctggacagcatggcctgcaacgcgggcatcccgatgccgccggaagcgagaagaatcataatggggaaggccatccagcctcgcgtcggcgcttaagacattgattattgactagttattaatagtaatcaattacggggtcattagttcatagcccatatatggagttccgcgttacataacttacggtaaatggcccgcctggctgaccgcccaacgacccccgcccattgacgtcaataatgacgtatgttcccatagtaacgccaatagggactttccattgacgtcaatgggtggagtatttacggtaaactgcccacttggcagtacatcaagtgtatcatatgccaagtccgccccctattgacgtcaatgacggtaaatggcccgcctggcattatgcccagtacatgaccttacgggactttcctacttggcagtacatctacgtattagtcatcgctattaccatggtgatgcggttttggcagtacaccaatgggcgtggatagcggtttgactcacggggatttccaagtctccaccccattgacgtcaatgggagtttgttttggcaccaaaatcaacgggactttccaaaatgtcgtaacaactgcgatcgcccgccccgttgacgcaaatgggcggtaggcgtgtacggtgggaggtctatataagcagagctcgtttagtgaaccgagttttaaaagttaacccgtggttttaccctagtttcggtgaatttgccaattttacggaataactgtttgaaaggttcaaactctggtgtccaacgtttgtattaaaatgagtggattaggaggccttcttcccctccgagggaagaaaaagaaagcccctgtgatacaatcacagggcagggtcttgccgaagagcgactggaagggagctccgaaacaggatctaaataaaaagaaagcgaaaaaggacgagacgaaaggccagaattggccaagaagaattaacccccggactggacaatggtcggcaattgagggctctggtgctcggctgtggagaagcattttctctacagacttgatcggaggcttgttgttgttgatcgctattttatcaaatctctacgaaaaggttagacgtgacataacggaattgaaacgcagagtgactcgattggaaaaatctcgagctagtttgattttgaccccaatggtgttgctgtgtctggctatcctcgcggcaggcaagaccatgaatggaataatggacaagggtgagcacgtttggaaagctgactggaatgttgactttaccaatgtgaagctccccaaggacttctgcggatctggaatacacgtggagaagatgtgtcctcaggttgattctttgcaagatgcaacaatcgactgcgcaggaagacatgaccaatttctcctgtcctatacacgatgtgcggctaagaatcgtgtcaaacgtggtgaacccggagtagtggaaccgaaagtcacgaacatatggaccataacgttcaatgatgagttgaacagcatcattgaacgtgtgagcgggatgctgaagaacaatcgattgatggcaacagcagtcatttgcttagttggggctttcaagaaatggcctacatggctcgtcgtgcttttggttttactgccttggactgtcgtgcaggcagagtttgttgagccattcttggttttaaaacatgaccacagtactatgctcatgaccagactgtacccaggagaaatcgctcacgttgcaactcctgccgggttggtggacattcgtgttagccatgcccaaatttttggaggtcaacgctttcgtgagttactgagcgactgctctgtgaacgcttcgtattcgaccgacatatgccccggaggatcacaacttgacttggaatcgatcaaaggtcctggacgtgtctgcatgaccgctccgtacaatcgaggatggggaaccggatgtttcaaatggggaattggagctgttgccacgtgcgttgagttgaactgcacacgggaaacaaaagttgatttgttgacaaattctgctattgtggccaacgtgacagtcaatttccactcgaccaatgacactaaactccttgtgcctgacaccccaattacgttgaagtttgggaagttaggaacgatgacaatgacgtgtcgtttgggaaatgaccgcattgctaacgatttttaccatgtaactgacaatattgcatctggactgttccagaaagctttgattgatgcgtgggaaggaccctccaagatggcgaaccacattagcggacatgaaaaagtcgtgaagtggggtcacattctcccaaatgagatcaaggtcagcaagatcattgaaatggagttagattgggaaaaagcgatcaccacacatgatggattttcgaacacctatttttggtgtcaagtggccgtgaacaagttggtcgttgggtcatttgcctcatgcaagagcggagcgaaggctagcttcatccaatcctcgtggggttttgatggtgtggttgaagtgactttggatgaggccaccaaaaccatttgctccctacccctgacatgtaccggatgtagcttgttggctacaaaagtggttttccttgagggaagccagcgggctgttgggcacgtggggtgtggaaatggaacatcaatgttgacagtaggaacgacaaaggttgggatccaatgtgtggtcacaccggtgtcacaaatttggaacttcgtgactcacgcttccggacgatatgcgaaacttggttttggaggagttggaggagctttccatgatctgctagtgaaggttggattgaccttcacctgggattcatggaagatcatcaccgtgttgtctggtctcgtagtggcttttgccatctttgatcggaagttggtgatcctgatcattatcctctgtggaatcgcttatacccgagctgacattggatgtggcattgattttgacaggaagacctacacgtgtggaagcggtctattcgtgtggaagggtttgggaaaatacccaacggccgaccattctgttgagtttgcctcatatgattttctatcagcgtacctccaggagcagtttaagtctgagaagaaggtttgtattatttgtgaagacattgtccagtgtgaggcagctagaaaagcagccgctgcggtgtataaaaacctaggccacccgtttgtctacgtgaacacgtcggactcctatggaaaagtatttgccgaaatcccgaaaagagtccacactgttagtgtgggagtcgacgttgtggaaatggccatgatgactagggagaacaaaccggttggaccgtttggtgacttaccgcgtagtatggtttcgtggaagagtatccctgaaacagaagagcacccagtgttgagagtgttgacatcttcaagtgattaccagaaggtatgtggaaaagcgattggattccagtatgattttgttggataccgtcggaccatgtatggatctaatgtccagttaaaaatatcaaagaaggtttcgattgaatgtcccacatacttggcaggagtcgccgtgaaaaatgatagaacggttttcactgatggaatgttctggatgtcatcgaaacgtgagaatggaacatacgcgatcactgagttagagatggagcagtcccacaagtgcatctggccagaccaatacactcctgacgccactttgacgccacgtgacaatgaaatgtttgttccgcctgagtggggagggccaatgtcgaaagccaaccacattcctggttacaaaatgcagactggatttccatggaacaaagcccccattcggtttgttgagggaagtgttccaggaaccattgtcacacagattagccactgtgatggtagagggattgcagccgaagtgaatccagcaacgcagcccaattggtgctgtaagtcctgtacaaggattttccactttgaagtcgatgggaaactctattatccaatggagattcggcccgacccgaaaggaggggaacagcaaaaagttcctgtagtggagacacccattggagatgaagaaaccgagactgttggtggatggctgggtagaatgtataacattccaggagctgagggatcatatgcggattttcgactccccaagttgccaaattcaagaccaagcgcaatggtggggagtttggtcaatctattatgcttgatgttttcaattcagatagttaccaagactatgcgggcaagaacgcttatgcgtttctatctttgttgcttggtttttatgttctttggaatgccaactttgtttggattaagtgggtttttggcgtggatgatgattctaccaatctcacacaactcggtaacaatgtgcaacctaaccgtgcatctgtgggctgtactgctaaaccagagctcggcgatgtttctgtggggcctaacgctccgatcccagatacagaggtctaccgctggacagatgctactctttaccatgcagatgttgcatcacgccatctacgcgcactcttgggtgttcgggtgggtcatcgaagtatgcttgtcagtcgggcttatgatgaacttgttaaccgtcatcgatacggttcacccgaaactgatcgcatacttgctcttcttcggatggaaaacgggcatgtgcgtagtgtgcgcttggttattgatatactcaatcaggagatggaactctatagtcgccgcggctccggccgcgggcgggtggaggtcagggtatcgaacaatgatgtcctccagtttgattgttatctttatcagtgtaggaattgcaggagttatcgcttcggactatggaggttatccggctgcggctgcggtgactgcagcattgttgataatgggaatcaaaatgtttgactttctgacgacccgattgtctcttgagttcgtatctgcaggcatgttccccgaaggtgttgaaaaagcctttgaaccggactcggtcagtgacttgtttagggcatctttcactgtagatgggataaagttgcaggaccatgttgaaccgatccccattttgtttgccattttgtacatctttattggagctgtggcctgtaaggttaacccggccctcggaatagtgtatgctatcgccatgttcgcgactcctttaccggagttaatgcgtttatacatgatgaccatctattcctctacatttcggacagacactctgcttgggatggctatcccagaaacggagccagaactgtctcaagactttgggccaatccctgatgggatttatcgggtgaacaatcatggattttcagtgaagagtcatcggggagttggaatcgtaaagaatggggtttttcacactctcatgcatgtcacgctcaatgagccactcgcgtggcaaaatcgcctagtaggaccttcaatgggccactctctcaaggactatgtcacatacggtggaaactggcaattgcctgactttgatattgttaatgaggtgggcataatggtttgtggacgggatcgttccattcagtacaaaagacacgaggttgggacaatcatgatcgacgacaagcgagtgatgtacttcactcatgattacgggcacggatcatctggttcaccaatttttgtgaacggagaacctgtggccttatacggcttcgggttccatttgtacaataggtatcgatcaatagttctgcctatcccacgtgaagaagtccttgatggggctagtaatgagggcataccagctgagcacggaaccatgcgcaacaagttttttgttgactggcatccaggaaaagggaaaacccgaaaagtgatcgttaaagaggtgttaaatgctttgaatttagcacggcggattgttgttctggcccctacacgagttgtcctggctgaaataactaaggcaataggggaaaacacatcaaaaacgccctcaaaaaatcttgctttcaccggtcacaatattgtgacggtggcttgccacgcgacgttcactgattatgttttgcgtcatgggttatcaaaattcaaagctcacgaagtcataatggatgagtgccattttctggacccacgatctatagctgcgagaggaatcctggagcatctggcaactaaacgtggagttaaagtcacgtttatgagtgcaacgatcccaggacgtgaaccttcactcgggtcgaattttgagatctctgaacaggccttgcagtttccccgtgacgtcaaccaaaggtggatagaaactgttgctaggggaaagaccgttgccttcgtgccatctcacagggtaggtgacaagctagctcgcgggtgtccccaagccatttccctgcataggaacaattttgacaccaattacagcacagctatggatgagtccataaaatttatctacaccactgacatatcggaaatgggagccaatttcagtgctgacaccgtcatagatttccgggtggcgattaagccaaagatttctagtgaatttgccgtcactcttgaaccaactccgatcacgcgatcatcgatgattcaacggcgtggtcgagttggaagacaacgacctggaacctatatttacccagttgacaaaggcgtcgaagatgcctccgatcagttggcttgttggacagaagctcagatgttgttggatcaattggacttgacaatgatggcagaggaagttcggcagtcaaacattccaggggcttacaaattagttgggcgtagcctagacatatttcggaagttgctggagaaggatgacataccaatctggctgagctggaagtgggccgacagtgttcaacaacaatactccatattgtttgaaggagaacgtcaagagaatgtcgctcgtgtcgtcaacactcgagactatgcttctctagagtataagccgaagtttgttgatgcacgattcgagcgtcttggatgggatcaacgaaagctgtcaattcagttttacatgaacactcggagcttcataactttcgccactttgtcacacgtcatttctcaagtgatcgaagctggagttgtcaattctgcttggaagcgaataggagacgttagcatcatctttactgaaggaggcgacccacatgctaaagatgaaactatcatggcttggactattctggttggaggagtgttgggggctcttggattcctcatagttgcatggggaatgaaggctgtcttgcgagtaattttcggatcccgcgataagcatcttagcgtcccaaccttagtggcggatttccaaccatacatagtgtgtatagttcccattgccctacatcttgctggggttcctataccaatgacaattgtgtttttcgcgatgcttttcttgacttatccactaatgtacaagagtgccggacaacggagttatgttgacattgacttggtgaaatggattctgttaggtggatgtattgtaactggagtcatttgctgggaaatgagattgctcccaaacatctcatcagacatttcagctattttgaataggcaaagacaaagggaagacaccccaacttttgatgcttcaccaccttgggaatggttggatttagcacagccagtccctcacaatgttgaattgacgtcagtggtgataactacattcacgacctggctgttcttgcaccaaattgtcggatggtcatacgagtcagagtggctgaaatcctatttcgaccacaaaggagtgggtcagatcatgggtggttttcggttggacacaatttcatggggatcagctctaagcggtcttctgggcacagctacttatgcctcatggggagccattttgactgggttaggaggagcggttgtgtattttttcctgatggtttcaatgctcaagtggaacttttcgggaggagccacaactggcttagaaaacaatgtcatgcgaaacgaccgagaaactggactaggtaatcggccggcaaacgacaataggcgttccctcctgtacggtgtggtggcggctgaatgtcttgtgtggttgttctgtttcagaactgccacggatgccatagtggtggcttgtttagtgtcctattgtttatggatcatcaacaacccggctagccctcaccacaaaaacactgacttaggatcggcgtgtagtttcatcggtcttttgtactgtacatgtcctactcaaaaatgcatccaagtattgatgaggtttgctttggccaggttgaacatgaacacccgctctctggaaaaaagcgcgacgggaggccttggacaccgttggaagaagctattaaatgcgatgacactattggaattcaacgcttaccgatcttgtggagttgacgagactgagaagggtgactatgtgtcacgaggagggctgaagctgagagagataaccatgaagtatggttggaagccagaagggatatgtgttgatcttggatgcggcagaggaggatggtcacagcacttggctatggatccccgcgtaactagagtggaatcattcacgttaggaggaacagcacgagaaaatccccagccaatcaagacacttggtcataaccttatccggttcaagagtggagtcaatgtgtataatatgacgccaacacatgctaacaccatagtgtgtgatatcggagaaagtgaccccaaaccagaggtggaaacctctagaacattgcgggtcctcaaaacacttgaactatggttggccaggaatccaaacgctgaatttgtgtgcaaagtcctttgcccataccccgtggaagtcctcaaatgtctggaaacccttcaacataagtatggcggaagaattattaggtcgacgtatagccgaaattcaagtgctgaaatgtattacatttctggaggccgtaacaacatggtgaaggttatcttcaccaccctccactccttgatttcgaggatacgaactaggccggagaaaatcgtcaaagaaagtgtttctctaccagttgggactagaagcgatccagggcacaagatcaagagtatggatccaaagatgatagcaacgcgggtggaaaagataaaaaaggaacatgcggacacgtggttcgttgacaacaaccatccataccaatcatttcggtatgtgggatcgtacgtcacagatgatgtgacaccaggaggtcagactgtcaacccattaatgagaaaaatgatgtggccgtgggagactgttggaggagttgtaaatttcatgatgacggacgtgtccacatatgcccaacagaaggtgttgcgagagaaggtcgacacactatcccctgaacctccaaacgacattcaaagggttaacagatggatcaccgagttcttgtgtgcttcattcatgcgtcgagggttgaaacctagaatcctgaccatggagcaatatatcaacaacgtaaagagctcagctgccattggatcgtggagcagtgatgtcccgtggagcagtgtccgagaagctttagctgataaaagattccaccaaatggtcgaggaggaaaggaaactccacttagcaggagactgccgcatgtgcgtgtacaacaccatgggcaagaaggagaagaaaccttcagccatgggcgtggccaagggctctcgaaccatttggtacatgtggttaggttcacggtttttggagtacgaagcccttggcttcttaaatgaagatcattgggtgtcacgagacaacttggcatgtggtgttggtggagtgggagtgaattacttcggctactacctacaagaaattgcacggaaagggaagttttttatcgccgatgacatagcgggatgggacacgcggatcaatgagagtgacttggccgatgaggaatttctcatcatgtccctcatttgtgacccataccatcgatcacttgcaaaagccgtgtttcggtttgcctaccagaacattgtggccttgtttccgcgaaatcatcctgggtttggaagtggaacggtgatggatgtcgtggccagaactgaccaacgaggttcaggacaggtcgtgacttacgctctaaacacgataacgaacgccaagattcaattaggcagaatgctggaagccgaaggattactagacgctcatgaacatgtaatcaaaaaatggttaaacgacaatggtgaagaggctctctccgggatggtggtggccggggatgatgttgtagttgcgaccaacaacggaaatttttcaaggtccttacgatacctccatttgaacgggaaaattcgtaaagacattgatccgtccctaccgtccaaagttgaaacgaactgggaggtggttgaattttgttctcaccattaccacgtgatgaccttaaaggacggacgacgaataattgtcccatgccgagagcagaatgaaatcattggacgaggcaggattcaaaaaggagggttggtgacccttgccgaaagtgcctgcctagcgaaggcttatgggcaaatgtgggctttgtatttctttcaccgaagagatctgcggatggcttttctagccataacttcgagtgttccaatagactggttcccagagggccggacctcgtggtcgattcaccaaaataaagagtggatgaccactgaggacatgttgcgggtctggaatacagtgtggatccaggacaatccctggatggaggacaaaatggaaatcgaaaattggagggacattccgtacctcccgaaatccatggacctaaagtgcggcagtctcattggaacaaaagaaagagccgcttggtcaaaggatctgccgtcaacggtcacggcagttcggaaaattatcgaccaagacacgaaaaccgagaatgtctaccaagactttcttggcggaatgggccggttccaaacgtacactgaccccatggcaacgtaagaaaccatcttttccaaattagtcgaaaaattttgcccctcttcgaggggctttggcggcagcaggagattttctccggggtttcacgctccccccgatgccagtggtcacagcccaagtcagagacttggagttgtggcgggacagtgagctctgtcagtggtcaatagctcaataaatatggcagcagagcttgtctcggggattcacgctccccccattgtgagtgtgtcgaactggtttcgaaggacgtctagaacgacgctaaagttcaaatccggcaacagagagtttatgtctcggggcctcacgcaccccccgttgtgagtgaagtcctttctggccatttagtggtcaggaagggtaccgttttggaacgacggaaataagttccatggagcgacactagccccactgaggggcggttggaatgacacccaacccgctatagtgcgtcgacaggtcaattagctacctggaataagctaatgtgcagggcaacaaagttctaacgaactagggtgagtagcgtcaccccccggttgtgaaaacgattgcgactagaactaaagtcgagagtctccccaccgataggggagctcgtcagtttgttttagtccaattacgctgggtcggcatggcatctccacctcctcgcggtccgacctgggcatccgaaggaggacgtcgtccactcggatggctaagggagagccacttttctctcgattctctatcggaatctagggagctcggatccagacatgataagatacattgatgagtttggacaaaccacaactagaatgcagtgaaaaaaatgctttatttgtgaaatttgtgatgctattgctttatttgtaaccattataagctgcaataaacaagttaacaacaacaattgctcgagggggg

SEQ ID NO: 399 - DNA, 11696 bp, Artificial Sequence
  synthetic
gggtcggcatggcatctccacctcctcgcggtccgacctgggcatccgaaggaggacgtcgtccactcggatggctaagggagagccacttttctctcgattctctatcggaatctagggagctcggatccagacatgataagatacattgatgagtttggacaaaccacaactagaatgcagtgaaaaaaatgctttatttgtgaaatttgtgatgctattgctttatttgtaaccattataagctgcaataaacaagttaacaacaacaattgctcgagggggggcccggtaccttgaagctgtccctgatggtcgtcatctacctgcctggacagcatggcctgcaacgcgggcatcccgatgccgccggaagcgagaagaatcataatggggaaggccatccagcctcgcgtcggcgcttaaggatcatgatgataaacaatgtatggtgctaatgttgcttcaacaacaattctgttgaactgtgttttcatgtttgccaacaagcacctttatactcggtggcctccccaccaccaacttttttgcactgcaaaaaaacacgcttttgcacgcgggcccatacatagtacaaactctacgtttcgtagactattttacataaatagtctacaccgttgtatacgctccaaatacactaccacacattgaacctttttgcagtgcaaaaaagtacgtgtcggcagtcacgtaggccggccttatcgggtcgcgtcctgtcacgtacgaatcacattatcggaccggacgagtgttgtcttatcgtgacaggacgccagcttcctgtgttgctaaccgcagccggacgcaactccttatcggaacaggacgcgcctccatatcagccgcgcgttatctcatgcgcgtgaccggacacgaggcgcccgtcccgcttatcgcgcctataaatacagcccgcaacgatctggtaaacagttttaaaaaacttttgcgttagtaaaaccacggagttttggtttgctgagaatagtgcgagggttgttttaattatttcggagattttggttcgtgatgaatcaggagagaggaatactcaggggtatggggaggttcccccccccccctgtgaagaaggggaacaagaattctgttgccgtggccagggtgccaccgcagcaaggaggaaaagcgagagagaaaaaccgtgagaggattaaagcgccaggagcgcgacatggagttgccggaaagatgaaaagtctaatgggagaattgggctttggatggattgatttactacgcgttgatttggtggaaggaattatgatgatggtttttgttatacagcgggctttcgcccaagtgcaccggagaattagaggattatcaagacgcgtcagggcattggagaagaagcgtgacggtcgagcggctatgttcatttggactatattggcaatgttattcggagttatgggaaagaccatgaatggaataatggacaagggtgagcacgtttggaaagctgactggaatgttgactttaccaatgtgaagctccccaaggacttctgcggatctggaatacacgtggagaagatgtgtcctcaggttgattctttgcaagatgcaacaatcgactgcgcaggaagacatgaccaatttctcctgtcctatacacgatgtgcggctaagaatcgtgtcaaacgtggtgaacccggagtagtggaaccgaaagtcacgaacatatggaccataacgttcaatgatgagttgaacagcatcattgaacgtgtgagcgggatgctgaagaacaatcgattgatggcaacagcagtcatttgcttagttggggctttcaagaaatggcctacatggctcgtcgtgcttttggttttactgccttggactgtcgtgcaggcatcactggccgatcctttcttaattctgccgaagggtgatggtttggtaaaaactagattatacccaggacagatttcatcaatttccacacacgttggggtactggacatctcttatatggctgtggacattgaggaggggcgactcgttgaaaggttgatgtcacattgcgaagtaaatggaacttactcacaggattgttgcgctttgggatgcaacttggacttatctaagttaaatgagcggaacagggcctgtcaaacggctacctacaatcgcgggtgggctacgggatgtccagtttttggactgggcagtgtggccacatgcgttgaggtcgcgtgcagcgatagtgtggaggtgtccgaactgacaagccagaacatccggattcctctatctctacgtttgcagcatgaagagctgaatgtgaccatgacaacagaggcgccagttacttcaaagttctcacatcacggggtggtatccatctcttgtcaaattggcaatcctgggttcttggcacagcagtacgtgctgagcaatgggaagcataaagcaatgtttcccatcagtgcggtatcaggttggcctggaatccgtgagattggtggacagtacaggaacgtggatggctccgtcaagtgggggcacgttgaagcgaatgagattaaggtggccgctgtatatagtgacagcatccaatggaagactggaatcccgataaagacaggtattagagacccactgtatttgtactgtgaagtgtcgctaactgacttgactttcaagaaaataagagcatgtgaatcgcctgttgaagtttcgttcatggcaggacctacgggtttggatggtcgrctagaaattgggttgcttgagcaagtcaacaaaacatgctcaataacagggagctgtgaaggttgtaccttaccgcacccaaccagtgtcatttcgacttctgacaagaaaggccacatgcacgtagaatgtcgcacggggacatttacggcaatattcggaaagcaaaaattttctttcacctgtcrracwagttacctcagaactatttgggctacgactgcccaggcgattggaaattataggaaattcggactggatgcctcaggaggaccatttttggacttatggaataagataggtccaaatttctcccgtttggaggttgttggaatccttgttgtggcagccttgttaattgacaaaagactcttacttctcctggctatttttggatacgtcacatacgtgcgagctgacttcggatgtggatttgacccagataggaaggtagcacagtgtggttctggctcattcgtgtggaagtcactggcccgttggccaatggctgatcacgctattgagtttgaagatagcaaagtgatggtgacttacttgactgacctattgatgagaaagaacaaagtctgcatagtgtgtgaagatgtattgcagtgtgccgcagcgcgtggagttgtcgagcagataacgtcgatcaatggaatcccaatccatcacaacatgtcgctgtcgcatggccgatatttcccacgtgtagtgaagaaagtacacaatgttaaggtgggaaaagccatgttgcgccttgcaatggccacatatgcgggagcgatgcctgagagtggattgggtgttttgaagacggggtatttttcacgcggagaagtgcaggaaacgtgggatgataaagttctaagagtcctaaccagcgccataaatgcagaggaagtgtgccagacggctgtcacgttccagtatgagttcgttcgatataaccggaaagtctttggatctaacatcgtgttgcgaccttcagcctttacgagcaaagcttgcccaacatatttagctggggctgtggtcaaaaacgacatagcaacgtttacggacggaatgatgtggatgcggagccggaaagtcaatgaaacgtgggaactgtttgagttggaaacaacccaaagccaccaatgcatttggccatacgcgtacacaatagacctagcaacacccacggacaagaggcttttcatgccgccacaatacggaggaccaatttcgtttgcgaaccacgtgcctggattccaggtgcaagaggactttccctggcagaaggcgaatatattaatgcgccagggaccggttccgggaacgaccgtagtccaggatccacactgtgatgaccggagcgcggcagtgccagttgaaccaactatgcaagcttggtgctgcaagacctgttttgatagaggagtgaagcctttccattttgtggttgacgggaaatttttctatccaatggaagtgcggccaatgaaactggaacaagacgctgtggtgattgagactgatgatggagagttcgagaggagtgagcatgagagcttgtttgaaggcaaagcaaagtggacatcaccgttaccaatgggagaaacagccaagattcaaaattttttcgtgaccagcccgccaaagccggaatcaagcctgcttttggtgggcgttctgattcatatgttaacaacgcgaacccgccatcggtgggcaactcgttgtgctggaacttggctcatctttttggtctttggacatccggttgtgtcttcggtgcagtcttgggcgtggctctttatgtcagctgccttagcaagtgtccctggtggttcttcactggtgatccacttctggattgggttgcagatatcgtcagcgcacctcttttacctgggttggttaatgaggaaacgcctgttgattacagagatgtcgcgagtggcacatctgattgcccagttgtgcagcttcgagacatatgcgtgggcaccgatcctcaaagtactggatcacttgctgtttccactctacactctgtcagtattcgtcgttcaccagcagtttcaggtattccacgacttgtggctacagagcgccgtggtgatggcacacctgttgcaacaccctctcagtggtttaataaccttgagtttaagcgtcggcttgattcagctaatagcaccaatgaaaagatggttttgctcaccagttatatggggagatggcttacgcgcgccgagaccacactggacagccttaacgtatttcatcgtgctgtatttggcagccgctgggatggagacagtgggtctgcacacgtccgggatgacagtgatgctgggcgggatgcttctgtgggttgtcctacagttgatgcccccgacagccttggaacttgtgcgcctaccgggacaaagtctgccagacggatgtgaagaagaagcgtcaacatctctaccagaaggaatgagtgggcattacgcccccgatggagttgaactcgtgaactacacagatgcagggactgtctccgcaaaccttgtggtatttgttgggtgtgctggaattatgactatgaacatatacgttgggttggttatcacggccttggcctgggtaacggacgccccgatgtggattccaagattgattgatggtgctatgtcccagcgggcaaattcggagctattgctgccatccccacctcttgagatacacaagacggaagactcgtttggttacatcccggacggaacatatcacgtgttggctagcagctggatgagcaagaaaccagttggtgttggagtggtgaaggagggcgtgtttcacacgttacaccacgtcaccaaaggagctaatgtgacatgggcaggacgtgaggttaggatgcactctggagatgttaggcgggatattgctgcctatggcgggccctggaacatcagcgggagtcttgaagatgtcgtagtagtgaaggccgtgaacaaggatggaaccgtgacatgctgccggattacaacagctaagttggacattgaaggaactacagtgatggctgttgagcgagattttggtttcggctcttcggggtcccccatatacgctcctgatggacggttgattggcttgtatggatacgggttttactatggaacgtacttctcaatagtttcaacaggagaaggagtggaggcaccaccggaagaggttgaagtctcaacacgtgagtttgtggactggcaccctggaagaggaaaaacgcgcacgatactcgttgagcaggccctgaagcatatagctgatggaaagaggttgctaattttgacaccaacgcgggtcgtaaaggatgaagtgcagcgagcgataaaggaagccgccccgcaggcggttatcggatcgaacttaagcatttttcggaagaacgccgttaccttggcatgccacgcgaccttcacgcagtatgtgatggagaaggggatagaaagtgtgaagttttcgaccatcattatggacgagtgccactttctggacccgatgtccatcgcgtgccgcgggataatggatttccacaacagccgtggaacgaaggtcatcttcatgagtgcgacgcccccaggacgagcaggaaacgctgggtccaactttacaatagaagacagagccatcaagttccccaaggagttgaccgcatcgtggatcaaagacaagtcaataggcaagaccatcgtttttgtgccaacaattacgcaagctgtgaggctggctaaagagttgggaggggtggccttgacccgagatacgttcaatgatgccatggggaaggcccggagtccggaaacaatgtttataatctcaacagacatcagcgagatgggagccaatctcggagtgactactgttatcgacacaagaactgttataaaaccattagtgtctgacaaaggagtttcacttgaaagggttggtgtgaccccagcttcaatcatccagcgcaggggccgagtaggtcggcgggagcccggagtatacatttatccccttgacgtcgaaccagaggagcagccggaaaattgggtgtgttgggtggaggcgcaaatgatcttagatcaattgggctgccatccgatgagagaggagagcgaatttttccgcccacaaggcacgtaccggattgacgacgtagagcagcggaggtttctggggttgatcaaggaaaaactgccaatttggcttgcttggacttgggccagctcacatgcgaacaaacatcagatgctatttcagggaaacgcccccaacactggacgaacattaaaaataaagacgccatccggatctcacatttacgccccaaaggtgacagatgataggtttgaaaaggagccagaaattgtgaaagtggcggccatcggattcttcctaaagcagagatcactatacttcgacttacctggattattgaccggattgtacacggtgttgacaacggctgggctcgatgcccttggaaattcgttcaaacgctctgtggacacccttcacgacatcggaaatgcggtggaaggagagttttctgctatacaaatgggacggattttacagatgtggtctgcgttgtttatcggggtgactttgggagttgtgctgatgggagccggatttgttgtggtgaaggcttttagaggattgtttggaacccgccaacaacacacaactgtgtgcgtgtcggagggcggaagtttccaaaaagttgccacggttctaatgagcgttggaccattgtgcgccgtttttggtggcattccctctatattcgtcttcattgtgaccgttgccctgttgattgtgctgtgtgtgggcggaggtggctctcaacgtggtgtgcttgattcggatctaatacgctgggtcatggtgttggccatgatgacaatcggagtgactgcgtgggagttggagctattaccaaacgtgagaagagatgttatacagttgactcgatacctgtttgctagcaatcctgccgttgttggagctgtgtttaacgccgggaatatcggattgggagtctctctgccagggaccctcatgatgagctacgccgcgagcggaacgctggccccccttattggagcgtgggccgaaggaaatttcttaggaaagctctttggtagcgaagtgcttccagctcaggctataggcggatttcaagtgacagctatcccgtggggatctatggtgccggttatcgctggttgctttctagcgacaaacactctttcgaaagtgtttggtgctggaattacaactgtgtttctcatactactctacttcgacaagaaacatgcattcacgaacaaggctgttaaggttttgttggcgcggacaaacagaagggacatggaggaagaaatcacaacaagggacgcggagtcgcgggctcgccaactgttttatggcctacaactggccgtatcgttgctgtgggttctctcacatcctgtgttggaaaacttcgttccattctttgctgtgtgcgggtacacattcctgtcgctcttgaggccaaatcatcaactacatgctgcgttggattatacattggtagtcctgctcttgcaggtagttgaacctgggaacatcatgtacgtcggcggatgcgttttgttatggtatgttttaaaccctaccagattgggcgtgcgctcgctggtgaagagtgacaccggaggtttaggcttccgttggaagaaagcgttgaattcacttagtgagaggcagtttgccatctacaaagtcagaggcgtgaatgaaactgataaaggagcctacgtgtcgcgaggtggtttaaaaatgaacgagattatcaacaagcatgcgtgggaacctcgaggagttgtcgttgacctgggatgtggacgaggaggttggtcccagcgcttggtgatggattaccgcgtcgctgaagtaagaggatacacacttggaggcaaagaacgtgagaatccccaaccgttccaaacgaaaggatataacttggcgaatttgaaggctggagttgacgtctataaaatggagccagtgaattgtaacaccataatttgcgacataggtgagagtgacccgcgtcctgaagttgaaaaaactcgaacgctgaaggttttgggaatgctggagaaatggctggaagtcaatccaaacgcctctttttgctgcaaagtgctatcaccttatcacttggacgtgcttcgaaagttagagtcgctgcaacacaagtataacgggcggctggttcgactgtcttacagtcggaactcaacagcagaaatgtattatgtgtcaggaaagagggcaaacgtggtggcaagcgtgtacttcatgcttgggtcgctggtaggtaggctgcggagacatgagccatcaatcatcgaccccccaccggttctagagatgggaaccagaagcgatccgcgagcaaaggccaaagcgcaagacttcgagatgatccgaagaagagtggaacgactacgaggagaaaatcggaaaacatggtttgtggacaacgaacatccatatgtgtcatttaactaccatggatccttcgtgactgatgaggtgacagcgggcggacaaacaacaaatcccttgattagacgcgttatgtggccatgggactttctgtctcgggtgacaacctttatgatgaccgatgtttcaacgtatgcccaacaaaaggtgctgcgtgaaaaagtggacactgtctctgaggagcccgacgagcgaatgaaagcaattaacagactcatcatgacacacttcgtgaaaatgttcaagcggcgcgggctgaaaccgagggtgttgacaccacaagactacatgaataatgtccaagccaacgcagccataggaggatggagcgaagtaatggattggcaaaacgtgcgcgatgctttggcagatcaacgattctgggacatggtagataacgagagggccttacacttgcgtggtgactgtgagctttgcatctataacacgatgggaaagaaagaaaagaagccatctgcctttggcactgcgaaaggttcacgcaccatctggtatatgtggctgggtagccgttatttagagtacgaggctttaggattcttgaacgaagatcattgggttgcacgagaaaactttccatgtggagtcggtggcgtcggcgttaactattttggatattacctgaaggaaatagccgggggaggccggtggcttatcgcagacgatgtcgcgggatgggacacgagaataacccaaggagatctagatgatgagctgttcatgttaaccgagcttgccccaaccacataccacaagaaattgataactgcgacaatgacgttggcttataaaaacatagtggccttattccctagaaatcatccgatgtaccgaagtggaactgttcttgatgtgttgtctcgaacggatcagcgtgggtcgggccaggtgacaacatacgctttgaacactgtgactaatggaaagtgccaggtcgggagaacattagaagcgtgtggcttgctggacgccccgctcaccacaatcgactcctggctcactgccaacttggaacgagttcttggagcaatggtcgttgccggagatgatgtggtagtggcgacagacaatgaagaattccacacgagtttgagatacataacagcgacgtcaaagatccgaaagaacttaggggtgagtgagccatcgccgagattcacgagctgggaagatgttgagttttgctcacaccacttccatccactgacgttacgtgatggccgtgtgctgatcgccccgtgtcgtgaccaaaacgaaattatcggaagatcaagaatccagaaaggcggaatagttgacatggcctcggctgggtgcttagcgaaggctcacgcgcagatgtgggccctttacttcttccatcggcgagacttacggattggattcgcggccatcacatcaattgtgcctatcaactgggtgccgacgggcaggatatcatggtctatccaccagaacgcagagtggatgacgactgaggatatgctaacggtttggaacaacgtgtggattagggacaatccgtggatgagaggaaaagaacgagtgacttcatggacagacataccgtatttacccaaaggagtggacataaagtgcggaagcctaataggcgattccgaccgcgcttcctggtcaaagacgattcccctagttgtggagaagacccgaaaaatccttgagcaggagaggggaacattgaagttctacaatgggttatccattctaggacggtatgttcaccacgtcgatcctgtgttcaactgaagtgtgacgatgtaggcccgcgggagccttagaattcaagagcttgggaattctagaatcccgtttaccgcaggagggggtcatatggagcaggtggctatgtatagcctggctaaatgtatggctcctgggggagtgacgcccctccggttccagttcctgggtgaacaggtaaaaaccaccacgaagcgccgcttcaacatcgcaagggggagaaatcccgggtgctgacgccaccccgaccccagtcccacataaggctgtgacgaaagagccttaccggcacgaggagtgcccaccgcaaggaggagaaatcctgggcgttgacgacgccccggccccagtctctgataggtgaccagaaccatgtcaccccaaagtgttgaaaggacactgatcaccagaaatggtgagggcacacagggcttagcccaaggtgagtgacgacacctcccgaaatgtgtaaatagcagggtcagctctaagcagcaggcttccaccgttaggaagcgttgctgtgagcttacttggctacgtct

SEQ ID NO: 400 - DNA, 11032 bp, Artificial Sequence
  synthetic
  misc_feature (151)..(151): n is a, c, g, or t
agttttaaaaaacttttgcgttagtaaaaccacggagttttggtttgctgagaatagtgcgagggttgttttaattatttcggagattttggttcgtgatgaatcaggagagaggaatacycaggggtatggggaggttcccccccccccntgtgaagaaggggaacaagaattctgttgccgtggccagggtgccaccgcagcaaggaggaaaagcgagagagaaaaaccgtgagaggattaaagcgccaggagcgcgacatggagttgccggraagatgaaaagyctaatgggagaattgggctttggatggattgatttactacgcgttgatttggtggaaggaattatgatgatggkttttgttatacagcgggctttcgcccaagtgcaccggagaattagaggattatcaagacgcgtcagggcattggagaagaagcgtgacggtcgagcggctatgttcatttggactatattggcaatgttattcggagttatgggagcggaggtcactagacgtgggagtgcatactatatgtacttggacagaaacgatgctggggaggccatatcttttccaaccacattggggatgaataagtgttatatacagatcatggatcttggacacatgtgtgatgccaccatgagctatgaatgccctatgctggatgagggggtggaaccagatgacgtcgattgttggtgcaacacgacgtcaacttgggttgtgtacggaacctgccatcacaaaaaaggtgaagcacggagatctagaagagctgtgacgctcccctcccattccactaggaagctgcaaacgcggtcgcaaacctggttggaatcaagagaatacacaaagcacttgattagagtcgaaaattggatattcaggaaccctggcttcgcgttagcagcagctgccatcgcttggcttttgggaagctcaacgagccaaaaagtcatatacttggtcatgatactgctgattgccccggcatacagcatcaggtgcataggagtcagcaatagggactttgtggaaggtatgtcaggtgggacttgggttgatgttgtcttggaacatggaggttgtgtcaccgtaatggcacaggacaaaccgactgtcgacatagagctggttacaacaacagtcagcaacatggcggaggtaagatcctactgctatgaggcatcaatatcagacatggcttcggacagccgctgcccaacacaaggtgaagcctaccttgacaagcaatcagacactcaatatgtctgcaaaagaacgttagtggacagaggctggggaaatggatgtggactttttggcaaagggagcctggtgacatgcgctaagtttgcatgctccaagaaaatgaccgggaagagcatccagccagagaatctggagtaccggataatgctgtcagttcatggctcccagcacagtgggatgatcgttaatgacacaggacatgaaactgatgagaatagagcgaaggttgagataacgcccaattcaccaagagccgaagccaccctggggggttttggaagcctaggacttgattgtgaaccgaggacaggccttgacttttcagatttgtattacttgactatgaataacaagcactggttggtccacaaggagtggttccacgacattccattaccttggcacgctggggcagacaccggaactccacactggaacaacaaagaagcactggtagagttcaaggacgcacatgccaaaaggcaaactgtcgtggttctagggagtcaagaaggagcagttcacacggcccttgctggagctctggaggctgagatggatggtgcaaagggaaggctgtcctctggccacttgaaatgtcgcctgaaaatggataaacttagattgaagggcgtgtcatactccttgtgtaccgcagcgttcacattcaccaagatcccggctgaaacactgcacgggacagtcacagtggaggtacagtacgcagggacagatggaccttgcaaggttccagctcagatggcggtggacatgcaaactctgaccccagttgggaggttgataaccgctaaccccgtaatcactgaaagcactgagaactctaagatgatgctggaacttgatccaccatttggggactcttacattgtcataggagtcggggagaagaagatcacccaccactggcacaggagtggcagcaccattggaaaagcatttgaagccactgtgagaggtgccaagagaatggcagtcttgggagacacagcctgggactttggatcagttggaggcgctctcaactcattgggcaagggcatccatcaaatttttggagcagctttcaaatcattgtttggaggaatgtcctggttctcacaaatcctcattggaacgttgctgatgtggttgggtctgaacacaaagaatggatctatttcccttatgtgcttggccttagggggagtgttgatcttcttatccacagccgtctctgctgacttcggatgtggatttgacccagataggaaggtagcacagtgtggttctggctcattcgtgtggaagtcactggcccgctggccaatggctgatcacgcyattgagtttgaagatagcaaagtgatggtgacttacttgactgacctattgatgagaaagaacaaagtctgcatagtgtgtgaagatgtrttgcartgtgcygcagcgcgtggagttgtcgagcarataacgtcgatcaatggaatcccaatccatcacaacatgtcgctgtcgcatggccgatatttyccacgtgtagtgaagaaagtacacaatgttaaggtgggaaaagccatgttgcgycttgcaatggccacatatgcgggagcgatgcctgaragtggattgggtgttttgaagacggggtatttttcacgcggagaagtgcaggaaacgtgggatgataaagttctaagagtcctaaccagcgccataaatgcrgaggaagtgtgccagacggctgtcackttccagtatgagttcgttcgatataaccggaaagtctttggatctaacatcgtgttgcgaccttcagcctttacgagcaaagcttgcccaacatatttagctggggctgtggtcaaaaacgacatagcaacgtttacggacggaatgatgtggatgcggagccggaaagtcaatgaaacgtgggaactgtttgagttggaaacaacccaaagccaccaatgcatttggccatacgcgtayacaatagacctagcaacacccacggacaagaggctyttcatgccgccacaatacggaggaccaatttcgtttgcgaaccatgtgcctggattccaggtgcaagaggactttccctggcagaaggcgaatatattaatgcgccagggaccggttccgggaacgaccgtagtccaggatccacactgtgatgaccgaagtgcggcagtgccagtcgaaccaactatgcaagcttggtgctgcaagacctgttttgatagaggagtgaagcctttccattttgtggttgacgggaaatttttctatccaatggaagtgcggccaatgaaactggaacaagacgctgtggtgattgagactgatgatggagagttcgagaggagtgagcatgagagcttgtttgaaggcaaagcaaagtggacatcaccgttaccaatgggagaaacagccaagatccaaaattttttcgtgaccagcccgccaaagccggaatcaagcctgcttttggtgggcgttctgattcatatgttaacaacgcgaacccgccatcggtgggcaactcgttgtgctggaacttggctcatctttttggtctttggacatccggttgtgtcttcggtgcagtcttgggcgtggctctttatgtcagctgccttagcaagtgtccctggtggttcttcactggtgatccacttctggattgggttgcagatatcgtcagcgcacctcttttacctgggttggttaatgaggaaacgcctgttgatcacagagatgtcgcgagtggcacatctgattgcccagttgtgcagcttcgagacatatgcgtgggcaccgatcctcaaagtactggatcacttgctgtttccactctacactctgtcagtattcgtcgttcaccagcagtttcaggtattccacgacttgtggctacagagcgccgtggtgatggcacacytgytkcaacaccctctcagtggtttaataaccttgagtttaagcgtcggcttgattcagctaatagcaccaatgaaaagatggttttgctcaccagttatatggggagatggcttacgcgcgccgagaccacactggacagccttaacgtatttcatcgtgctgtatttggcagccgctgggatggagacagtgggtctgcacacgtccgggatgacagtgatgctgggcgggatgcttctgtgggttgtcctacagttgatgcccccgacagcyttggaacttgtgcgcctaccgggacaaagyctgccagacggatgtgaagaagaagcrtcaacatcyctaccagamggaatgagtgggcattacgccccygatggagttgaactcgtgaactacacagatgcaggractgtctccgcaaaccttgtggtrtttgttgggtgtgctggaattatgacyatgaacatatacgttgggttggttatcacggccttggcctgggtaacggacgccccgatgtggattccragattgattgatggygctatgtcccagcgggcaaattcggagctattgctgccatccccacctcttgagatacacaagacggaagactcgtttggttacatcccggacggaacatatcacgtgttggctagcagctggatgagcaagaaaccagttggtgttggagtggtgaaggagggcgtgtttcacacgttacaccacgtcaccaaaggagctaatgtgacatgggcaggacgtgaggttaggatgcactctggagatgttaggcgggatattgctgcctatggcgggccctggaacatcagcgggagtcttgaagatgtcgtagtagtgaaggccgtgaacaaggatggaaccgtgacatgctgccggattacaacagctaagttggacattgaaggaactacagtgatggctgttgagcgagattttggtttcggctcttcggggtcccccatatacgctcctgatggacggttgattggcttgtatggatacgggttttactatggaacgtacttctcaatagtttcaacaggagaaggagtggaggcaccaccggaagaggttgaagtctcaacacgtgagtttgtggactggcaccctggaagaggaaaaacgcgcacgatactcgttgagcaggccctgaagcatatagctgatggaaagaggttgctaattttgacaccaacgcgggtcgtaaaggatgaagtgcagcgagcgataaaggaagccgccccgcaggcggttatcggatcgaacttaagcatttttcggaagaacgccgttaccttggcatgccacgcgaccttcacgcagtatgtgatggagaaggggatagaaagtgtgaagttttcgactatcattatggacgagtgccactttctggacccgatgtccatcgcgtgccgcgggataatggatttccacaatagccgtggaacgaaggtcatcttcatgagtgcgacgcccccaggacgagcaggaaacgctgggtccaactttacgatagaagacagagccattaagttccccaaggagttgaccgcatcgtggatcaaagagaagtcaataggcaagaccatcgtttttgtgccaacaattacgcaagctgtgaggctggctaaagagctgggaggggtggccttgacccgagatacgttcaatgatgccatggggaaggcccggagtccggaaacaatgtttataatctcaacagacattagcgagatgggagccaacctcggagtgactactgttatcgacacaagaactgttataaaaccattagtatctgacaaaggagtttcacttgaaagggttggtgtgaccccagcttcaatcatccagcgcaggggtcgagttggtcgacgagagcccggagtatacatttatccccttgacgtcgaaccagaggagcagccagaaaattgggtgtgttgggtggaggcgcaaatgatcctagatcaattgggctgccatccgatgagagaggagagcgaatttttccgcccgcaaggcacgtaccggattgacgacgttgagcagcggaggtttctcgggttgatcaaggaaaaactgccaatttggcttgcttggacttgggctagctcacatgcgaacaaacatcagatgctatttcagggaaacgcccccaacactggacgaacattaaaaataaagacgccatccggatctcacatttacgccccaaaggtgacagatgataggtttgaaaaggagccagaaattgtgaaagtggcggccatcggattcttcctaaagcagagatcactayacttcgacttacctggattattgaccggattgtacacggtgttgacaacggctgggctcgatgcccttggaaattcgttcaaacgctctgtggacacccttcacgacatcggaaatgcggtggaaggagagttttctgctatacaaatgggacggattttacagatgtggtctgcgttgtttatcggggtgactttgggagttgtgctgatgggagccggatttgttgtggtgaaggcttttagaggattgtttggaacccgccaacaacacacaactgtgtgcgtgtcggagggcggaagtttccaaaaagttgccacggttctaatgagcgttggaccattgtgcgccgtttttggtggcattccctctatattcgtcttcattgtgaccgttgccctgttgattgtgctgtgtgtgggcggaggtggctctcaacgtggtgtgcttgattcggatctaatacgctgggtcatggtgttggccatgatgacaatcggagtgactgcgtgggagttggagctattaccaaacgtgagaagagatgttatacagttgactcgatacctgtttgctagcaatcctgccgttgttggagctgtgtttaacgccgggaatatcggattgggagtctctctgccagggaccctcatgatgagctacgccgcgagcggaacgctggccccccttattggagcgtgggccgaaggaaatttcttaggaaagctctttggtagcgaagtgcttccagctcaggctataggcggatttcaagtgacagctatcccgtggggatctatggtgccggttatcgctggttgctttctagcgacaaacactctttcgaaagtgtttggtgctggaattacaactgtgtttctcatactactctacttcgacaagaaacatgcattcacgaacaaggctgttaaggttttgttggcgcggacaaacagaagggacatggaggaagaaatcacaacaagggacgcggagtcgcgggctcgccaactgttttatggcctacaactggccgtatcgttgctgtgggttctctcacatcctgtgttggaaaacttcgttccattctttgctgtgtgcgggtacacattcctgtcgctcttgaggccaaatcatcaactacatgctgcgttggattatacattggtagtcctgctcttgcaggtagttgaacctgggaacatcatgtacgtcggcggatgcgttttgttatggtatgttttaaaccctaccagattgggcgtgcgctcgctggtgaagagtgacaccggaggtttaggcttccgttggaagaaagcgttgaattcacttagtgagaggcagtttgccatctacaaagtcagaggcgtgaatgaaactgataaaggagcctacgtgtcgcgaggtggtttaaaaatgaacgagattatcaacaagcatgcatgggaaccccgaggagttgtcgttgacctaggatgtgggcgaggaggctggtcccagcgcttggtgatggattaccgcgtcgctgaagtaagaggatacactcttggaggcaaagaacgtgagaatccccaaccgttccaaacgaaaggatacaacttggcgaatttgaaggctggagttgacgtctacaaaatggagccagtgaattgcaacaccattatttgcgacataggtgagagtgacccacgccctgaagttgaaaagacacgaacgctgaaggttttgggaatgctrgagaaatggytggaagtcaatccaaacgcctctttttgctgcaaagtgctrtcrccttatcacttggacgtgcttcgaaagttagagtcgctgcaacacaagtataayggrcggctggttcgaytgtcttacagtcggaactcaacagcagaaatgtattaygtgtcaggaaagagrgcaaacgtggtggcaagcgtgtacttcatgctygggtcgctggtaggtaggctgcggagacatgagccatcaatcatcgaccccccrccrgttctagagatgggaaccagaagcgatccgcgrgcaaaggcsaaagcgcaagacttcgagatgatccgaagragagtrgaacgaytacgaggagaaaaycggaaaacatggtttgtrgacaacgaacatccatatgtgtcattyaactaccatggatccttcgtgactgatgaggtgacagcgggcggacaaacracaaatcccttgattagacgcgtyatgtggccatgggactttctgtctcgggtgacaacctttatgatgaccgatgtttcaacgtaygcccaacaaaaggtgctgcgygaaaargtggacactgtctctgaggagcccgacgagcgaatgaaagcaattaacagrctyatcatgacacacttcgtraaaatgttcaagcggcgcgggytgaaaccgagggtgttgacaccacaagactacatgaataatgtccaagccaacgcagccataggaggatggagcgaagtgatggattggcaaaacgtgcgcgatgctttggcagatcaacgattttgggacatggtagataacgagagagccttacacttgcgtggtgactgtgagctttgcatttataacacgatgggaaagaaggaaaagaagccatctgcctttggcactgcgaaaggttcacgcaccatctggtatatgtggcttggaagccgttatttagagtacgaggctttaggattcttgaacgaagatcattgggttgcacgagaaaactttccatgtggagtcggtggcgtcggtgttaattattttggatattatctgaaggaaatagccgagggaggccgatggttaatcgcagacgacgtcgcgggatgggacacgagaataacccaaggagatctagatgacgagctgttcatgttaactgagcttgccccaaccacataccacaagaaattgataactgcgacaatgacgttggcttataaaaacatagtggccttattccctagaaatcatccgatgtaccgaagtggaaccgttcttgatgtgttgtctcgaacggatcagcgtgggtcgggccaggtgacaacatacgctttgaacactgtgactaatggaaagtgccaggtcgggagaacattagaagcgtgtggcttgctggacgccccgctcaccacaatcgactcctggctcactgccaacttggaacgagttcttggakcaatggtcgttgccggagatgatgtggtagtggcgacagacaatgaagaattccacacgagtttgagatacataacagcgacgtcaaagatccgaaagaacttaggggtgagtgagccatcgccgagattcacgagctgggaagatgttgagttttgctcacaccacttccatccactgacgttacgtgatggccgtgtgctgatcgccccgtgtcgtgaccaaaacgaaattatcggaagatcaagaatccagaaaggcggaatagttgacatggcctcggctgggtgcttagcgaaggctcacgcgcagatgtgggccctttacttcttccatcggcgagacttacggattggattcgcggccatcacatcaattgtgcctatcaactgggtgccgacgggtaggatatcatggtctattcaccagaacgcagagtggatgacgactgaggatatgctaacggtttggaacaacgtgtggattagggacaatccgtggatgagaggaaaagaacgagtgacttcatggacagacataccgtatttacccaaaggagtggacataaagtgcggaagcctaataggcgattccgaccgcgcttcctggtcaaagacgattcccctagttgtggagaagacccgaaaaatccttgagcaggagaggggaacattgaagttctacaatgggttatccattctaggacggtatgttcaccaygtcgatcctgtgttcaactgaagtgtgacgatgtaggcccgcgggagccttagaattcaagagcttgggaattctagaatcccgtttaccgcaggagggggtcatatggagcaggtggctatgtatagcctggctaaatgtatggctcctgggggagtgacgcccctccggttccagttcctgggtgaacaggtaaaaaccaccacgaagcgccgcttcaacatcgcaagggggagaaatcccgggtgctgacgccaccccgaccccagtcccacataaggctgtgacgaaaragccttaccggcacgaggagtgcccaccgcaaggaggagaaatcctgggcgttgacgacgccccggccccagtctctgataggtgaccagaaccatgtcaccccaaagtgttgaaaggacactgatcaccagaaatggtgagggcacacagggcttagcccaaggtgagtgacgacacctcccgaaatgtgtaaatagcagggtcagctctaagcagcaggcttccaccgttaggaagcgttgctgtgagcttacttggctacgtct

SEQ ID NO: 401 - DNA, 11032 bp, Artificial Sequence
  synthetic
agttttaaaaaacttttgcgttagtaaaaccacggagttttggtttgctgagaatagtgcgagggttgttttaattatttcggagattttggttcgtgatgaatcaggagagaggaatactcaggggtatggggaggttcccccccccccctgtgaagaaggggaacaagaattctgttgccgtggccagggtgccaccgcagcaaggaggaaaagcgagagagaaaaaccgtgagaggattaaagcgccaggagcgcgacatggagttgccgggaagatgaaaagcctaatgggagaattgggctttggctggattgatttactacgcgttgatttggtggaaggaattatgatgatggtttttgttatacagcgggctttcgcccaagtgcaccggagaattagaggattatcaagacgcgtcagggcattggagaagaagcgtgacggtcgagcggctatgttcatttggactatattggcaatgttattcggagttatgggagcggaggtcactagacgtgggagtgcatactatatgtacttggacagaaacgatgctggggaggccatatcttttccaaccacattggggatgaataagtgttatatacagatcatggatcttggacacatgtgtgatgccaccatgagctatgaatgccctatgctggatgagggggtggaaccagatgacgtcgattgttggtgcaacacgacgtcaacttgggttgtgtacggaacctgccatcacaaaaaaggtgaagcacggagatctagaagagctgtgacgctcccctcccattccactaggaagctgcaaacgcggtcgcaaacctggttggaatcaagagaatacacaaagcacttgattagagtcgaaaattggatattcaggaaccctggcttcgcgttagcagcagctgccatcgcttggcttttgggaagctcaacgagccaaaaagtcatatacttggtcatgatactgctgattgccccggcatacagcatcaggtgcataggagtcagcaatagggactttgtggaaggtatgtcaggtgggacttgggttgatgttgtcttggaacatggaggttgtgtcaccgtaatggcacaggacaaaccgactgtcgacatagagctggttacaacaacagtcagcaacatggcggaggtaagatcctactgctatgaggcatcaatatcagacatggcttcggacagccgctgcccaacacaaggtgaagcctaccttgacaagcaatcagacactcaatatgtctgcaaaagaacgttagtggacagaggctggggaaatggatgtggactttttggcaaagggagcctggtgacatgcgctaagtttgcatgctccaagaaaatgaccgggaagagcatccagccagagaatctggagtaccggataatgctgtcagttcatggctcccagcacagtgggatgatcgttaatgacacaggacatgaaactgatgagaatagagcgaaggttgagataacgcccaattcaccaagagccgaagccaccctggggggttttggaagcctaggacttgattgtgaaccgaggacaggccttgacttttcagatttgtattacttgactatgaataacaagcactggttggtccacaaggagtggttccacgacattccattaccttggcacgctggggcagacaccggaactccacactggaacaacaaagaagcactggtagagttcaaggacgcacatgccaaaaggcaaactgtcgtggttctagggagtcaagaaggagcagttcacacggcccttgctggagctctggaggctgagatggatggtgcaaagggaaggctgtcctctggccacttgaaatgtcgcctgaaaatggataaacttagattgaagggcgtgtcatactccttgtgtaccgcagcgttcacattcaccaagatcccggctgaaacactgcacgggacagtcacagtggaggtacagtacgcagggacagatggaccttgcaaggttccagctcagatggcggtggacatgcaaactctgaccccagttgggaggttgataaccgctaaccccgtaatcactgaaagcactgagaactctaagatgatgctggaacttgatccaccatttggggactcttacattgtcataggagtcggggagaagaagatcacccaccactggcacaggagtggcagcaccattggaaaagcatttgaagccactgtgagaggtgccaagagaatggcagtcttgggagacacagcctgggactttggatcagttggaggcgctctcaactcattgggcaagggcatccatcaaatttttggagcagctttcaaatcattgtttggaggaatgtcctggttctcacaaatcctcattggaacgttgctgatgtggttgggtctgaacacaaagaatggatctatttcccttatgtgcttggccttagggggagtgttgatcttcttatccacagccgtctctgctgacttcggatgtggatttgacccagataggaaggtagcacagtgtggttctggctcattcgtgtggaagtcactggcccgttggccaatggctgatcacgccattgagtttgaagatagcaaagtgatggtgacttacttgactgacctattgatgagaaagaacaaagtctgcatagtgtgtgaagatgtattgcagtgtgccgcagcgcgtggagttgtcgagcagataacgtcgatcaatggaatcccaatccatcacaacatgtcgctgtcgcatggccgatatttcccacgtgtagtgaagaaagtacacaatgttaatgtgggaaaagccatgttgcgccttgcaatggccacatatgcgggagcgatgcctgagagtggattgggtgttttgaagacggggtatttttcacgcggagaagtgcaggaaacgtgggatgataaagttctaagagtcctaaccagcgccataaatgcagaggaagtgtgccagacagctgtcacgttccagtatgagttcgttcgatataaccggaaagtctttggatctaacatcgtgttgcgaccttcagcctttacgagcaaagcttgcccaacatatttagctggggctgtggtcaaaaacgacatagcaacgtttacggacggaatgatgtggatgcggagccggaaagtcaatgaaacgtgggaactgtttgagttggaaacaactcaaagccaccaatgcatttggccatacgcgtacacaatagacctagcaacacccacggacaagaggcttttcatgccgccacaatacggaggaccaatttcgtttgcgaaccatgtgcctggattccaggtgcaagaggactttccctggcagaaggcgaatatattaatgcgccagggaccggttccgggaacgaccgtagtccaggatccacactgtgatgaccgaagtgcggcagtgccagtcgaaccaactatgcaagcttggtgctgcaagacctgttttgatagaggagtgaagcctttccattttgtggttgacgggaaatttttctatccaatggaagtgcggccaatgaaactggaacaagacgctgtggtgattgagactgatgatggagagttcgagaggagtgagcatgagagcttgtttgaaggcaaagcaaagtggacatcaccattgccaatgggagaaacagccaagatccaaaattttttcgtgaccagcccgccaaagccggaatcaagcctgcttctggtgggcgttctgattcatatgttaacaacgcgaacccgccatcggtgggcagctcgttgtgctggaacttggctcatcttcttggtctttggacatccggttgtgtcttcggtgcagtcttgggcgtggctctttatgtcagctgccttagcaagtgtccctggtggttcttcactggtgatccacttctggattgggttgcagatatcgtcagcgcacctcttttacctgggttggttaatgaggaaacgcctgttgatcacagagatgtcgcgagtggcacatctgattgcccagttgtgcagcttcgagacatatgcgtgggcaccgatcctcaaagtactggatcacttgctgtttccactctacactctgtcagtattcgtcgttcaccagcagtttcaggtattccacgacttgtggctacagagcgccgtggtgatggcacacctgttgcaacaccctctcagtggtttaataaccttgagtttaagcgtcggcttgattcagctaatagcaccaatgaaaagatggttttgctcaccagttatatggggagatggcttacgcgcgccgagaccacactggacagccttaacgtatttcatcgtgctgtatttggcagccgctgggatggagacagtgggtctgcacacgtccgggatgacagtgatgctgggcgggatgcttctgtgggttgtcctacagttgatgcccccgacagccttggaacttgtgcgcctaccgggacaaagtctgccagacggatgtgaagaagaagcgtcaacatctctaccagaaggaatgagtgggcattacgcccccgatggagttgaactcgtgaactacacagatgcagggactgtctccgcaaaccttgtggtatttgttgggtgtgctggaattatgactatgaacatatacgttgggttggttatcacggccttggcctgggtaacggacgccccgatgtggattccaagattgattgatggtgctatgtcccagcgggcaaattcggagttattactgccatccccacctcttgagatacacaagacggaagactcgtttggttacatcccggacggaacatatcacgtgttggctagcagctggatgagcaagaaaccagttggtgttggagtggtgaaggagggcgtgtttcacacgttacaccacgtcaccaaaggagctaatgtgacatgggcaggacgtgaggttaggatgcactctggagatgttaggcgggatattgctgcctatggcgggccctggaacatcagcgggagtcttgaagatgtcgtagtagtgaaggccgtgaacaaggatggaaccgtgacatgctgccggattacaacagctaagttggacattgaaggaactacagtgatggctgttgagcgagattttggtttcggctcttcggggtcccccatatacgctcctgatggacggttgattggcttgtatggatacgggttttactatggaacgtacttctcaatagtttcaacaggagaaggagtggaggcaccaccggaagaggttgaagtctcaacacgtgagtttgtggactggcaccctggaagaggaaaaacgcgcacgatactcgttgagcaggccctgaagcatatagctgatggaaagaggttgctaattttgacaccaacgcgggtcgtaaaggatgaagtgcagcgagcgataaaggaagccgccccgcaggcggttatcggatcgaacttaagcatttttcggaagaacgccgttaccttggcatgccacgcgaccttcacgcagtatgtgatggagaaggggatagaaagtgtgaagttttcgactatcattatggacgagtgccactttctggacccgatgtccatcgcgtgccgcgggataatggatttccacaatagccgtggaacgaaggtcatcttcatgagtgcgacgcccccaggacgagcaggaaacgctgggtccaactttacgatagaagacagagccattaagttccccaaggagttgaccgcatcgtggatcaaagagaagtcaataggcaagaccatcgtttttgtgccaacaattacgcaagctgtgaggctggctaaagagctgggaggggtggccttgacccgagatacgttcaatgatgccatggggaaggcccggagtccggaaacaatgtttataatctcaacagacattagcgagatgggagccaacctcggagtgactactgttatcgacacaagaactgttataaaaccattagtatctgacaaaggagtttcacttgaaagggttggtgtgaccccagcttcaatcatccagcgcaggggtcgagttggtcgacgagagcccggagtatacatttatccccttgacgtcgaaccagaggagcagccagaaaattgggtgtgttgggtggaggcgcaaatgatcctagatcaattgggctgccatccgatgagagaggagagcgaatttttccgcccgcaaggcacgtaccggattgacgacgttgagcagcggaggtttctcgggttgatcaaggaaaaactgccaatttggcttgcttggacttgggctagctcacatgcgaacaaacatcagatgctatttcagggaaacgcccccaacactggacgaacattaaaaataaagacgccatccggatctcacatttacgccccaaaggtgacagatgataggtttgaaaaggagccagaaattgtgaaagtggcggccatcggattcttcctaaagcagagatcactacacttcgacttacctggattattgaccggattgtacacggtgttgacaacggctgggctcgatgcccttggaaattcgttcaaacgctctgtggacacccttcacgacatcggaaatgcggtggaaggagagttttctgctatacaaatgggacggattttacagatgtggtctgcgttgtttatcggggtgactttgggagttgtgctgatgggagccggatttgttgtggtgaaggcttttagaggattgtttggaacccgccaacaacacacaactgtgtgcgtgtcggagggcggaagtttccaaaaagttgccacggttctaatgagcgttggaccattgtgcgccgtttttggtggcattccctctatattcgtcttcattgtgaccgttgccctgttgattgtgctgtgtgtgggcggaggtggctctcaacgtggtgtgcttgattcggatctaatacgctgggtcatggtgttggccatgatgacaatcggagtgactgcgtgggagttggagctattaccaaacgtgagaagagatgttatacagttgactcgatacctgtttgctagcaatcctgccgttgttggagctgtgtttaacgccgggaatatcggattgggagtctctctgccagggaccctcatgatgagctacgccgcgagcggaacgctggccccccttattggagcgtgggccgaaggaaatttcttaggaaagctctttggtagcgaagtgcttccagctcaggctataggcggatttcaagtgacagctatcccgtggggatctatggtgccggttatcgctggttgctttctagcgacaaacactctttcgaaagtgtttggtgctggaattacaactgtgtttctcatactactctacttcgacaagaaacatgcattcacgaacaaggctgttaaggttttgttggcgcggacaaacagaagggacatggaggaagaaatcacaacaagggacgcggagtcgcgggctcgccaactgttttatggcctacaactggccgtatcgttgctgtgggttctctcacatcctgtgttggaaaacttcgttccattctttgctgtgtgcgggtacacattcctgtcgctcttgaggccaaatcatcaactacatgctgcgttggattatacattggtagtcctgctcttgcaggtagttgaacctgggaacatcatgtacgtcggyggatgcgttttgytatggtatgttytaaaccctaccagattgggcgtgcgctcgctggtgaagagtgacaccggaggtttaggcttccgttggaagaaagcgttgaattcacttagtgagaggcagtttgccatctacaaagtcagaggcgtgaatgaaactgataaaggagcctacgtgtcgcgaggtggtttaaaaatgaacgagattatcaacaagcatgcatgggaaccccgaggagttgtcgttgacctaggatgtgggcgaggaggctggtcccagcgcttggtgatggattaccgcgtcgctgaagtaagaggatacactcttggaggcaaagaacgtgagaatccccaaccgttccaaacgaaaggatacaacttggcgaatttgaaggctggagttgacgtctacaaaatggagccagtgaattgcaacaccattatttgcgacataggtgagagtgacccacgccctgaagttgaaaagacacgaacgctgaaggttttgggaatgctagagaaatggttggaagtcaatccaaacgcctctttttgctgcaaagtgctgtcgccttatcacttggacgtgcttcgaaagttagagtcgctgcaacacaagtataatggacggctggttcgattgtcttacagtcggaactcaacagcagaaatgtattacgtgtcaggaaagagagcaaacgtggtggcaagcgtgtacttcatgctcgggtcgctggtaggtaggctgcggagacatgagccatcaatcatcgaccccccgccagttctagagatgggaaccagaagcgatccgcgggcaaaggcgaaagcgcaagacttcgagatgatccgaaggagagtagaacgattacgaggagaaaaccggaaaacatggtttgtagacaacgaacatccatatgtgtcattcaactaccatggatccttcgtgactgatgaggtgacagcgggcggacaaacgacaaatcccttgattagacgcgtcatgtggccatgggactttctgtctcgggtgacaacctttatgatgaccgatgtttcaacgtacgcccaacaaaaggtgctgcgtgaaaaggtggacactgtctctgaggagcccgacgagcgaatgaaagcaattaacaggcttatcatgacacacttcgtaaaaatgttcaagcggcgcgggctgaaaccgagggtgttgacaccacaagactacatgaataatgtccaagccaacgcagccataggaggatggagcgaagtgatggattggcaaaacgtgcgcgatgctttggcagatcaacgattttgggacatggtagataacgagagagccttacacttgcgtggtgactgtgagctttgcatttataacacgatgggaaagaaggaaaagaagccatctgcctttggcactgcgaaaggttcacgcaccatctggtatatgtggcttggaagccgttatttagagtacgaggctttaggattcttgaacgaagatcattgggttgcacgagaaaactttccatgtggagtcggtggcgtcggtgttaattattttggatattatctgaaggaaatagccgagggaggccgatggttaatcgcagacgacgtcgcgggatgggacacgagaataacccaaggagatctagatgacgagctgttcatgttaactgagcttgccccaaccacataccacaagaaattgataactgcgacaatgacgttggcttataaaaacatagtggccttattccctagaaatcatccgatgtaccgaagtggaaccgttcttgatgtgttgtctcgaacggatcagcgtgggtcgggccaggtgacaacatacgctttgaacactgtgactaatggaaagtgccaggtcgggagaacattagaagcgtgtggcttgctggacgccccgctcaccacaatcgactcctggctcactgccaacttggaacgagttcttggatcaatggtcgttgccggagatgatgtggtagtggcgacagacaatgaagaattccacacgagtttgagatacataacagcgacgtcaaagatccgaaagaacttaggggtgagtgagccatcgccgagattcacgagctgggaagatgttgagttttgctcacaccacttccatccactgacgttacgtgatggccgtgtgctgatcgccccgtgtcgtgaccaaaacgaaattatcggaagatcaagaatccagaaaggcggaatagttgacatggcctcggctgggtgcttagcgaaggctcacgcgcagatgtgggccctttacttcttccatcggcgagacttacggattggattcgcggccatcacatcaattgtgcctatcaactgggtgccgacgggtaggatatcatggtctattcaccagaacgcagagtggatgacgactgaggatatgctaacggtttggaacaacgtgtggattagggacaatccgtggatgagaggaaaagaacgagtgacttcatggacagacataccgtatttacccaaaggagtggacataaagtgcggaagcctaataggcgattccgaccgcgcttcctggtcaaagacgattcccctagttgtggagaagacccgaaaaatccttgagcaggagaggggaacattgaagttctacaatgggttatccattctaggacggtatgttcaccacgtcgatcctgtgttcaactgaagtgtgacgaygtaggcccgcgggagccttagaattcaagwgcttggraattctagaatcccgtttaccgcaggagggggtcatatggagcaggtggctatgtatagcctggctaaatgtatggctcctgggggagtracgcccctccggttccagttcctgggtgaacaggtaaaaaccaccacgaagcgccgcttcaacatcgcaagggggagaaatcccgggtgctgacgccaccccgaccccagtcccacataaggctgtgacgaaaragccttaccggcacgaggagtgcccaccgcaaggaggagaaatcctgggcgttgacgacgcyccggccccagtctctgataggtgaccagaaccatgtcaccccaaagtgttgaaaggacactgatcaccagaaatggtgagggcacacagggcttagcccaaggtgagtgacgacacctcccgaaatgtgtaaatagcagggtcagctctaagcagcaggcttccaccgttaggaagcgttgctgtgagcttacttggctacgtct

SEQ ID NO: 402 - protein, 3385 aa, Artificial Sequence
  synthetic
MSGLGGLLPLRGKKKKAPVIQSQGRVLPKSDWKGAPKQDLNKKKAKKDETKGQNWPRRINPRTGQWSAIEGSGARLWRSIFSTDLIGGLLLLIAILSNLYEKVRRDITELKRRVTRLEKSRASLILTPMVLLCLAILAAGKTMNGIMDKGEHVWKADWNVDFTNVKLPKDFCGSGIHVEKMCPQVDSLQDATIDCAGRHDQFLLSYTRCAAKNRVKRGEPGVVEPKVTNIWTITFNDELNSIIERVSGMLKNNRLMATAVICLVGAFKKWPTWLVVLLVLLPWTVVQAEFVEPFLVLKHDHSTMLMTRLYPGEIAHVATPAGLVDIRVSHAQIFGGQRFRELLSDCSVNASYSTDICPGGSQLDLESIKGPGRVCMTAPYNRGWGTGCFKWGIGAVATCVELNCTRETKVDLLTNSAIVANVTVNFHSTNDTKLLVPDTPITLKFGKLGTMTMTCRLGNDRIANDFYHVTDNIASGLFQKALIDAWEGPSKMANHISGHEKVVKWGHILPNEIKVSKIIEMELDWEKAITTHDGFSNTYFWCQVAVNKLVVGSFASCKSGAKASFIQSSWGFDGVVEVTLDEATKTICSLPLTCTGCSLLATKVVFLEGSQRAVGHVGCGNGTSMLTVGTTKVGIQCVVTPVSQIWNFVTHASGRYAKLGFGGVGGAFHDLLVKVGLTFTWDSWKIITVLSGLVVAFAIFDRKLVILIIILCGIAYTRADIGCGIDFDRKTYTCGSGLFVWKGLGKYPTADHSVEFASYDFLSAYLQEQFKSEKKVCIICEDIVQCEAARKAAAAVYKNLGHPFVYVNTSDSYGKVFAEIPKRVHTVSVGVDVVEMAMMTRENKPVGPFGDLPRSMVSWKSIPETEEHPVLRVLTSSSDYQKVCGKAIGFQYDFVGYRRTMYGSNVQLKISKKVSIECPTYLAGVAVKNDRTVFTDGMFWMSSKRENGTYAITELEMEQSHKCIWPDQYTPDATLTPRDNEMFVPPEWGGPMSKANHIPGYKMQTGFPWNKAPIRFVEGSVPGTIVTQISHCDGRGIAAEVNPATQPNWCCKSCTRIFHFEVDGKLYYPMEIRPDPKGGEQQKVPVVETPIGDEETETVGGWLGRMYNIPGAEGSYADFRLPKLPNSRPSAMVGSLVNLLCLMFSIQIVTKTMRARTLMRFYLCCLVFMFFGMPTLFGLSGFLAWMMILPISHNSVTMCNLTVHLWAVLLNQSSAMFLWGLTLRSQIQRSTAGQMLLFTMQMLHHAIYAHSWVFGWVIEVCLSVGLMMNLLTVIDTVHPKLIAYLLFFGWKTGMCVVCAWLLIYSIRRWNSIVAAAPAAGGWRSGYRTMMSSSLIVIFISVGIAGVIASDYGGYPAAAAVTAALLIMGIKMFDFLTTRLSLEFVSAGMFPEGVEKAFEPDSVSDLFRASFTVDGIKLQDHVEPIPILFAILYIFIGAVACKVNPALGIVYAIAMFATPLPELMRLYMMTIYSSTFRTDTLLGMAIPETEPELSQDFGPIPDGIYRVNNHGFSVKSHRGVGIVKNGVFHTLMHVTLNEPLAWQNRLVGPSMGHSLKDYVTYGGNWQLPDFDIVNEVGIMVCGRDRSIQYKRHEVGTIMIDDKRVMYFTHDYGHGSSGSPIFVNGEPVALYGFGFHLYNRYRSIVLPIPREEVLDGASNEGIPAEHGTMRNKFFVDWHPGKGKTRKVIVKEVLNALNLARRIVVLAPTRVVLAEITKAIGENTSKTPSKNLAFTGHNIVTVACHATFTDYVLRHGLSKFKAHEVIMDECHFLDPRSIAARGILEHLATKRGVKVTFMSATIPGREPSLGSNFEISEQALQFPRDVNQRWIETVARGKTVAFVPSHRVGDKLARGCPQAISLHRNNFDTNYSTAMDESIKFIYTTDISEMGANFSADTVIDFRVAIKPKISSEFAVTLEPTPITRSSMIQRRGRVGRQRPGTYIYPVDKGVEDASDQLACWTEAQMLLDQLDLTMMAEEVRQSNIPGAYKLVGRSLDIFRKLLEKDDIPIWLSWKWADSVQQQYSILFEGERQENVARVVNTRDYASLEYKPKFVDARFERLGWDQRKLSIQFYMNTRSFITFATLSHVISQVIEAGVVNSAWKRIGDVSIIFTEGGDPHAKDETIMAWTILVGGVLGALGFLIVAWGMKAVLRVIFGSRDKHLSVPTLVADFQPYIVCIVPIALHLAGVPIPMTIVFFAMLFLTYPLMYKSAGQRSYVDIDLVKWILLGGCIVTGVICWEMRLLPNISSDISAILNRQRQREDTPTFDASPPWEWLDLAQPVPHNVELTSVVITTFTTWLFLHQIVGWSYESEWLKSYFDHKGVGQIMGGFRLDTISWGSALSGLLGTATYASWGAILTGLGGAVVYFFLMVSMLKWNFSGGATTGLENNVMRNDRETGLGNRPANDNRRSLLYGVVAAECLVWLFCFRTATDAIVVACLVSYCLWIINNPASPHHKNTDLGSACSFIGLLYCTCPTQKCIQVLMRFALARLNMNTRSLEKSATGGLGHRWKKLLNAMTLLEFNAYRSCGVDETEKGDYVSRGGLKLREITMKYGWKPEGICVDLGCGRGGWSQHLAMDPRVTRVESFTLGGTARENPQPIKTLGHNLIRFKSGVNVYNMTPTHANTIVCDIGESDPKPEVETSRTLRVLKTLELWLARNPNAEFVCKVLCPYPVEVLKCLETLQHKYGGRIIRSTYSRNSSAEMYYISGGRNNMVKVIFTTLHSLISRIRTRPEKIVKESVSLPVGTRSDPGHKIKSMDPKMIATRVEKIKKEHADTWFVDNNHPYQSFRYVGSYVTDDVTPGGQTVNPLMRKMMWPWETVGGVVNFMMTDVSTYAQQKVLREKVDTLSPEPPNDIQRVNRWITEFLCASFMRRGLKPRILTMEQYINNVKSSAAIGSWSSDVPWSSVREALADKRFHQMVEEERKLHLAGDCRMCVYNTMGKKEKKPSAMGVAKGSRTIWYMWLGSRFLEYEALGFLNEDHWVSRDNLACGVGGVGVNYFGYYLQEIARKGKFFIADDIAGWDTRINESDLADEEFLIMSLICDPYHRSLAKAVFRFAYQNIVALFPRNHPGFGSGTVMDVVARTDQRGSGQVVTYALNTITNAKIQLGRMLEAEGLLDAHEHVIKKWLNDNGEEALSGMVVAGDDVVVATNNGNFSRSLRYLHLNGKIRKDIDPSLPSKVETNWEVVEFCSHHYHVMTLKDGRRIIVPCREQNEIIGRGRIQKGGLVTLAESACLAKAYGQMWALYFFHRRDLRMAFLAITSSVPIDWFPEGRTSWSIHQNKEWMTTEDMLRVWNTVWIQDNPWMEDKMEIENWRDIPYLPKSMDLKCGSLIGTKERAAWSKDLPSTVTAVRKIIDQDTKTENVYQDFLGGMGRFQTYTDPMAT

SEQ ID NO: 403 - protein, 3484 aa, Artificial Sequence
  synthetic
LSLVLIKRLQLPTSMYLIPLMNQERGILRGMGRFPPPPVKKGNKNSVAVARVPPQQGGKAREKNRERIKAPGARHGVAGKMKSLMGELGFGWIDLLRVDLVEGIMMMVFVIQRAFAQVHRRIRGLSRRVRALEKKRDGRAAMFIWTILAMLFGVMGAEVTRRGSAYYMYLDRNDAGEAISFPTTLGMNKCYIQIMDLGHMCDATMSYECPMLDEGVEPDDVDCWCNTTSTWVVYGTCHHKKGEARRSRRAVTLPSHSTRKLQTRSQTWLESREYTKHLIRVENWIFRNPGFALAAAAIAWLLGSSTSQKVIYLVMILLIAPAYSIRCIGVSNRDFVEGMSGGTWVDVVLEHGGCVTVMAQDKPTVDIELVTTTVSNMAEVRSYCYEASISDMASDSRCPTQGEAYLDKQSDTQYVCKRTLVDRGWGNGCGLFGKGSLVTCAKFACSKKMTGKSIQPENLEYRIMLSVHGSQHSGMIVNDTGHETDENRAKVEITPNSPRAEATLGGFGSLGLDCEPRTGLDFSDLYYLTMNNKHWLVHKEWFHDIPLPWHAGADTGTPHWNNKEALVEFKDAHAKRQTVVVLGSQEGAVHTALAGALEAEMDGAKGRLSSGHLKCRLKMDKLRLKGVSYSLCTAAFTFTKIPAETLHGTVTVEVQYAGTDGPCKVPAQMAVDMQTLTPVGRLITANPVITESTENSKMMLELDPPFGDSYIVIGVGEKKITHHWHRSGSTIGKAFEATVRGAKRMAVLGDTAWDFGSVGGALNSLGKGIHQIFGAAFKSLFGGMSWFSQILIGTLLMWLGLNTKNGSISLMCLALGGVLIFLSTAVSADFGCGFDPDRKVAQCGSGSFVWKSLARWPMADHAIEFEDSKVMVTYLTDLLMRKNKVCIVCEDVLQCAAARGVVEQITSINGIPIHHNMSLSHGRYFPRVVKKVHNVKVGKAMLRLAMATYAGAMPESGLGVLKTGYFSRGEVQETWDDKVLRVLTSAINAEEVCQTAVTFQYEFVRYNRKVFGSNIVLRPSAFTSKACPTYLAGAVVKNDIATFTDGMMWMRSRKVNETWELFELETTQSHQCIWPYAYTIDLATPTDKRLFMPPQYGGPISFANHVPGFQVQEDFPWQKANILMRQGPVPGTTVVQDPHCDDRSAAVPVEPTMQAWCCKTCFDRGVKPFHFVVDGKFFYPMEVRPMKLEQDAVVIETDDGEFERSEHESLFEGKAKWTSPLPMGETAKIQNFFVTSPPKPESSLLLVGVLIHMLTTRTRHRWATRCAGTWLIFLVFGHPVVSSVQSWAWLFMSAALASVPGGSSLVIHFWIGLQISSAHLFYLGWLMRKRLLITEMSRVAHLIAQLCSFETYAWAPILKVLDHLLFPLYTLSVFVVHQQFQVFHDLWLQSAVVMAHLLQHPLSGLITLSLSVGLIQLIAPMKRWFCSPVIWGDGLRAPRPHWTALTYFIVLYLAAAGMETVGLHTSGMTVMLGGMLLWVVLQLMPPTALELVRLPGQSLPDGCEEEASTSLPEGMSGHYAPDGVELVNYTDAGTVSANLVVFVGCAGIMTMNIYVGLVITALAWVTDAPMWIPRLIDGAMSQRANSELLLPSPPLEIHKTEDSFGYIPDGTYHVLASSWMSKKPVGVGVVKEGVFHTLHHVTKGANVTWAGREVRMHSGDVRRDIAAYGGPWNISGSLEDVVVVKAVNKDGTVTCCRITTAKLDIEGTTVMAVERDFGFGSSGSPIYAPDGRLIGLYGYGFYYGTYFSIVSTGEGVEAPPEEVEVSTREFVDWHPGRGKTRTILVEQALKHIADGKRLLILTPTRVVKDEVQRAIKEAAPQAVIGSNLSIFRKNAVTLACHATFTQYVMEKGIESVKFSTIIMDECHFLDPMSIACRGIMDFHNSRGTKVIFMSATPPGRAGNAGSNFTIEDRAIKFPKELTASWIKDKSIGKTIVFVPTITQAVRLAKELGGVALTRDTFNDAMGKARSPETMFIISTDISEMGANLGVTTVIDTRTVIKPLVSDKGVSLERVGVTPASIIQRRGRVGRREPGVYIYPLDVEPEEQPENWVCWVEAQMILDQLGCHPMREESEFFRPQGTYRIDDVEQRRFLGLIKEKLPIWLAWTWASSHANKHQMLFQGNAPNTGRTLKIKTPSGSHIYAPKVTDDRFEKEPEIVKVAAIGFFLKQRSLYFDLPGLLTGLYTVLTTAGLDALGNSFKRSVDTLHDIGNAVEGEFSAIQMGRILQMWSALFIGVTLGVVLMGAGFVVVKAFRGLFGTRQQHTTVCVSEGGSFQKVATVLMSVGPLCAVFGGIPSIFVFIVTVALLIVLCVGGGGSQRGVLDSDLIRWVMVLAMMTIGVTAWELELLPNVRRDVIQLTRYLFASNPAVVGAVFNAGNIGLGVSLPGTLMMSYAASGTLAPLIGAWAEGNFLGKLFGSEVLPAQAIGGFQVTAIPWGSMVPVIAGCFLATNTLSKVFGAGITTVFLILLYFDKKHAFTNKAVKVLLARTNRRDMEEEITTRDAESRARQLFYGLQLAVSLLWVLSHPVLENFVPFFAVCGYTFLSLLRPNHQLHAALDYTLVVLLLQVVEPGNIMYVGGCVLLWYVLNPTRLGVRSLVKSDTGGLGFRWKKALNSLSERQFAIYKVRGVNETDKGAYVSRGGLKMNEIINKHAWEPRGVVVDLGCGRGGWSQRLVMDYRVAEVRGYTLGGKERENPQPFQTKGYNLANLKAGVDVYKMEPVNCNTIICDIGESDPRPEVEKTRTLKVLGMLEKWLEVNPNASFCCKVLSPYHLDVLRKLESLQHKYNGRLVRLSYSRNSTAEMYYVSGKRANVVASVYFMLGSLVGRLRRHEPSIIDPPPVLEMGTRSDPRAKAKAQDFEMIRRRVERLRGENRKTWFVDNEHPYVSFNYHGSFVTDEVTAGGQTTNPLIRRVMWPWDFLSRVTTFMMTDVSTYAQQKVLREKVDTVSEEPDERMKAINRLIMTHFVKMFKRRGLKPRVLTPQDYMNNVQANAAIGGWSEVMDWQNVRDALADQRFWDMVDNERALHLRGDCELCIYNTMGKKEKKPSAFGTAKGSRTIWYMWLGSRYLEYEALGFLNEDHWVARENFPCGVGGVGVNYFGYYLKEIAGGGRWLIADDVAGWDTRITQGDLDDELFMLTELAPTTYHKKLITATMTLAYKNIVALFPRNHPMYRSGTVLDVLSRTDQRGSGQVTTYALNTVTNGKCQVGRTLEACGLLDAPLTTIDSWLTANLERVLGAMVVAGDDVVVATDNEEFHTSLRYITATSKIRKNLGVSEPSPRFTSWEDVEFCSHHFHPLTLRDGRVLIAPCRDQNEIIGRSRIQKGGIVDMASAGCLAKAHAQMWALYFFHRRDLRIGFAAITSIVPINWVPTGRISWSIHQNAEWMTTEDMLTVWNNVWIRDNPWMRGKERVTSWTDIPYLPKGVDIKCGSLIGDSDRASWSKTIPLVVEKTRKILEQERGTLKFYNGLSILGRYVHHVDPVFN

SEQ ID NO: 404 - protein, 3464 aa, Artificial Sequence
  synthetic
MNQERGILRGMGRFPPPPVKKGNKNSVAVARVPPQQGGKAREKNRERIKAPGARHGVAGKMKSLMGELGFGWIDLLRVDLVEGIMMMVFVIQRAFAQVHRRIRGLSRRVRALEKKRDGRAAMFIWTILAMLFGVMGAEVTRRGSAYYMYLDRNDAGEAISFPTTLGMNKCYIQIMDLGHMCDATMSYECPMLDEGVEPDDVDCWCNTTSTWVVYGTCHHKKGEARRSRRAVTLPSHSTRKLQTRSQTWLESREYTKHLIRVENWIFRNPGFALAAAAIAWLLGSSTSQKVIYLVMILLIAPAYSIRCIGVSNRDFVEGMSGGTWVDVVLEHGGCVTVMAQDKPTVDIELVTTTVSNMAEVRSYCYEASISDMASDSRCPTQGEAYLDKQSDTQYVCKRTLVDRGWGNGCGLFGKGSLVTCAKFACSKKMTGKSIQPENLEYRIMLSVHGSQHSGMIVNDTGHETDENRAKVEITPNSPRAEATLGGFGSLGLDCEPRTGLDFSDLYYLTMNNKHWLVHKEWFHDIPLPWHAGADTGTPHWNNKEALVEFKDAHAKRQTVVVLGSQEGAVHTALAGALEAEMDGAKGRLSSGHLKCRLKMDKLRLKGVSYSLCTAAFTFTKIPAETLHGTVTVEVQYAGTDGPCKVPAQMAVDMQTLTPVGRLITANPVITESTENSKMMLELDPPFGDSYIVIGVGEKKITHHWHRSGSTIGKAFEATVRGAKRMAVLGDTAWDFGSVGGALNSLGKGIHQIFGAAFKSLFGGMSWFSQILIGTLLMWLGLNTKNGSISLMCLALGGVLIFLSTAVSADFGCGFDPDRKVAQCGSGSFVWKSLARWPMADHAIEFEDSKVMVTYLTDLLMRKNKVCIVCEDVLQCAAARGVVEQITSINGIPIHHNMSLSHGRYFPRVVKKVHNVNVGKAMLRLAMATYAGAMPESGLGVLKTGYFSRGEVQETWDDKVLRVLTSAINAEEVCQTAVTFQYEFVRYNRKVFGSNIVLRPSAFTSKACPTYLAGAVVKNDIATFTDGMMWMRSRKVNETWELFELETTQSHQCIWPYAYTIDLATPTDKRLFMPPQYGGPISFANHVPGFQVQEDFPWQKANILMRQGPVPGTTVVQDPHCDDRSAAVPVEPTMQAWCCKTCFDRGVKPFHFVVDGKFFYPMEVRPMKLEQDAVVIETDDGEFERSEHESLFEGKAKWTSPLPMGETAKIQNFFVTSPPKPESSLLLVGVLIHMLTTRTRHRWAARCAGTWLIFLVFGHPVVSSVQSWAWLFMSAALASVPGGSSLVIHFWIGLQISSAHLFYLGWLMRKRLLITEMSRVAHLIAQLCSFETYAWAPILKVLDHLLFPLYTLSVFVVHQQFQVFHDLWLQSAVVMAHLLQHPLSGLITLSLSVGLIQLIAPMKRWFCSPVIWGDGLRAPRPHWTALTYFIVLYLAAAGMETVGLHTSGMTVMLGGMLLWVVLQLMPPTALELVRLPGQSLPDGCEEEASTSLPEGMSGHYAPDGVELVNYTDAGTVSANLVVFVGCAGIMTMNIYVGLVITALAWVTDAPMWIPRLIDGAMSQRANSELLLPSPPLEIHKTEDSFGYIPDGTYHVLASSWMSKKPVGVGVVKEGVFHTLHHVTKGANVTWAGREVRMHSGDVRRDIAAYGGPWNISGSLEDVVVVKAVNKDGTVTCCRITTAKLDIEGTTVMAVERDFGFGSSGSPIYAPDGRLIGLYGYGFYYGTYFSIVSTGEGVEAPPEEVEVSTREFVDWHPGRGKTRTILVEQALKHIADGKRLLILTPTRVVKDEVQRAIKEAAPQAVIGSNLSIFRKNAVTLACHATFTQYVMEKGIESVKFSTIIMDECHFLDPMSIACRGIMDFHNSRGTKVIFMSATPPGRAGNAGSNFTIEDRAIKFPKELTASWIKEKSIGKTIVFVPTITQAVRLAKELGGVALTRDTFNDAMGKARSPETMFIISTDISEMGANLGVTTVIDTRTVIKPLVSDKGVSLERVGVTPASIIQRRGRVGRREPGVYIYPLDVEPEEQPENWVCWVEAQMILDQLGCHPMREESEFFRPQGTYRIDDVEQRRFLGLIKEKLPIWLAWTWASSHANKHQMLFQGNAPNTGRTLKIKTPSGSHIYAPKVTDDRFEKEPEIVKVAAIGFFLKQRSLHFDLPGLLTGLYTVLTTAGLDALGNSFKRSVDTLHDIGNAVEGEFSAIQMGRILQMWSALFIGVTLGVVLMGAGFVVVKAFRGLFGTRQQHTTVCVSEGGSFQKVATVLMSVGPLCAVFGGIPSIFVFIVTVALLIVLCVGGGGSQRGVLDSDLIRWVMVLAMMTIGVTAWELELLPNVRRDVIQLTRYLFASNPAVVGAVFNAGNIGLGVSLPGTLMMSYAASGTLAPLIGAWAEGNFLGKLFGSEVLPAQAIGGFQVTAIPWGSMVPVIAGCFLATNTLSKVFGAGITTVFLILLYFDKKHAFTNKAVKVLLARTNRRDMEEEITTRDAESRARQLFYGLQLAVSLLWVLSHPVLENFVPFFAVCGYTFLSLLRPNHQLHAALDYTLVVLLLQVVEPGNIMYVGGCVLLWYVLNPTRLGVRSLVKSDTGGLGFRWKKALNSLSERQFAIYKVRGVNETDKGAYVSRGGLKMNEIINKHAWEPRGVVVDLGCGRGGWSQRLVMDYRVAEVRGYTLGGKERENPQPFQTKGYNLANLKAGVDVYKMEPVNCNTIICDIGESDPRPEVEKTRTLKVLGMLEKWLEVNPNASFCCKVLSPYHLDVLRKLESLQHKYNGRLVRLSYSRNSTAEMYYVSGKRANVVASVYFMLGSLVGRLRRHEPSIIDPPPVLEMGTRSDPRAKAKAQDFEMIRRRVERLRGENRKTWFVDNEHPYVSFNYHGSFVTDEVTAGGQTTNPLIRRVMWPWDFLSRVTTFMMTDVSTYAQQKVLREKVDTVSEEPDERMKAINRLIMTHFVKMFKRRGLKPRVLTPQDYMNNVQANAAIGGWSEVMDWQNVRDALADQRFWDMVDNERALHLRGDCELCIYNTMGKKEKKPSAFGTAKGSRTIWYMWLGSRYLEYEALGFLNEDHWVARENFPCGVGGVGVNYFGYYLKEIAEGGRWLIADDVAGWDTRITQGDLDDELFMLTELAPTTYHKKLITATMTLAYKNIVALFPRNHPMYRSGTVLDVLSRTDQRGSGQVTTYALNTVTNGKCQVGRTLEACGLLDAPLTTIDSWLTANLERVLGSMVVAGDDVVVATDNEEFHTSLRYITATSKIRKNLGVSEPSPRFTSWEDVEFCSHHFHPLTLRDGRVLIAPCRDQNEIIGRSRIQKGGIVDMASAGCLAKAHAQMWALYFFHRRDLRIGFAAITSIVPINWVPTGRISWSIHQNAEWMTTEDMLTVWNNVWIRDNPWMRGKERVTSWTDIPYLPKGVDIKCGSLIGDSDRASWSKTIPLVVEKTRKILEQERGTLKFYNGLSILGRYVHHVDPVFN

SEQ ID NO: 405 - protein, 3241 aa, Artificial Sequence
  synthetic
  misc_feature (498)..(498): Xaa can be any naturally occurring amino acid
KTMNGIMDKGEHVWKADWNVDFTNVKLPKDFCGSGIHVEKMCPQVDSLQDATIDCAGRHDQFLLSYTRCAAKNRVKRGEPGVVEPKVTNIWTITFNDELNSIIERVSGMLKNNRLMATAVICLVGAFKKWPTWLVVLLVLLPWTVVQASLADPFLILPKGDGLVKTRLYPGQISSISTHVGVLDISYMAVDIEEGRLVERLMSHCEVNGTYSQDCCALGCNLDLSKLNERNRACQTATYNRGWATGCPVFGLGSVATCVEVACSDSVEVSELTSQNIRIPLSLRLQHEELNVTMTTEAPVTSKFSHHGVVSISCQIGNPGFLAQQYVLSNGKHKAMFPISAVSGWPGIREIGGQYRNVDGSVKWGHVEANEIKVAAVYSDSIQWKTGIPIKTGIRDPLYLYCEVSLTDLTFKKIRACESPVEVSFMAGPTGLDGRLEIGLLEQVNKTCSITGSCEGCTLPHPTSVISTSDKKGHMHVECRTGTFTAIFGKQKFSFTCXTSYLRTIWATTAQAIGNYRKFGLDASGGPFLDLWNKIGPNFSRLEVVGILVVAALLIDKRLLLLLAIFGYVTYVRADIGCGIDFDRKTYTCGSGLFVWKGLGKYPTADHSVEFASYDFLSAYLQEQFKSEKKVCIICEDIVQCEAARKAAAAVYKNLGHPFVYVNTSDSYGKVFAEIPKRVHTVSVGVDVVEMAMMTRENKPVGPFGDLPRSMVSWKSIPETEEHPVLRVLTSSSDYQKVCGKAIGFQYDFVGYRRTMYGSNVQLKISKKVSIECPTYLAGVAVKNDRTVFTDGMFWMSSKRENGTYAITELEMEQSHKCIWPDQYTPDATLTPRDNEMFVPPEWGGPMSKANHIPGYKMQTGFPWNKAPIRFVEGSVPGTIVTQISHCDGRGIAAEVNPATQPNWCCKSCTRIFHFEVDGKLYYPMEIRPDPKGGEQQKVPVVETPIGDEETETVGGWLGRMYNIPGAEGSYADFRLPKLPNSRPSAMVGSLVNLLCLMFSIQIVTKTMRARTLMRFYLCCLVFMFFGMPTLFGLSGFLAWMMILPISHNSVTMCNLTVHLWAVLLNQSSAMFLWGLTLRSQIQRSTAGQMLLFTMQMLHHAIYAHSWVFGWVIEVCLSVGLMMNLLTVIDTVHPKLIAYLLFFGWKTGMCVVCAWLLIYSIRRWNSIVAAAPAAGGWRSGYRTMMSSSLIVIFISVGIAGVIASDYGGYPAAAAVTAALLIMGIKMFDFLTTRLSLEFVSAGMFPEGVEKAFEPDSVSDLFRASFTVDGIKLQDHVEPIPILFAILYIFIGAVACKVNPALGIVYAIAMFATPLPELMRLYMMTIYSSTFRTDTLLGMAIPETEPELSQDFGPIPDGIYRVNNHGFSVKSHRGVGIVKNGVFHTLMHVTLNEPLAWQNRLVGPSMGHSLKDYVTYGGNWQLPDFDIVNEVGIMVCGRDRSIQYKRHEVGTIMIDDKRVMYFTHDYGHGSSGSPIFVNGEPVALYGFGFHLYNRYRSIVLPIPREEVLDGASNEGIPAEHGTMRNKFFVDWHPGKGKTRKVIVKEVLNALNLARRIVVLAPTRVVLAEITKAIGENTSKTPSKNLAFTGHNIVTVACHATFTDYVLRHGLSKFKAHEVIMDECHFLDPRSIAARGILEHLATKRGVKVTFMSATIPGREPSLGSNFEISEQALQFPRDVNQRWIETVARGKTVAFVPSHRVGDKLARGCPQAISLHRNNFDTNYSTAMDESIKFIYTTDISEMGANFSADTVIDFRVAIKPKISSEFAVTLEPTPITRSSMIQRRGRVGRQRPGTYIYPVDKGVEDASDQLACWTEAQMLLDQLDLTMMAEEVRQSNIPGAYKLVGRSLDIFRKLLEKDDIPIWLSWKWADSVQQQYSILFEGERQENVARVVNTRDYASLEYKPKFVDARFERLGWDQRKLSIQFYMNTRSFITFATLSHVISQVIEAGVVNSAWKRIGDVSIIFTEGGDPHAKDETIMAWTILVGGVLGALGFLIVAWGMKAVLRVIFGSRDKHLSVPTLVADFQPYIVCIVPIALHLAGVPIPMTIVFFAMLFLTYPLMYKSAGQRSYVDIDLVKWILLGGCIVTGVICWEMRLLPNISSDISAILNRQRQREDTPTFDASPPWEWLDLAQPVPHNVELTSVVITTFTTWLFLHQIVGWSYESEWLKSYFDHKGVGQIMGGFRLDTISWGSALSGLLGTATYASWGAILTGLGGAVVYFFLMVSMLKWNFSGGATTGLENNVMRNDRETGLGNRPANDNRRSLLYGVVAAECLVWLFCFRTATDAIVVACLVSYCLWIINNPASPHHKNTDLGSACSFIGLLYCTCPTQKCIQVLMRFALARLNMNTRSLEKSATGGLGHRWKKLLNAMTLLEFNAYRSCGVDETEKGDYVSRGGLKLREITMKYGWKPEGICVDLGCGRGGWSQHLAMDPRVTRVESFTLGGTARENPQPIKTLGHNLIRFKSGVNVYNMTPTHANTIVCDIGESDPKPEVETSRTLRVLKTLELWLARNPNAEFVCKVLCPYPVEVLKCLETLQHKYGGRIIRSTYSRNSSAEMYYISGGRNNMVKVIFTTLHSLISRIRTRPEKIVKESVSLPVGTRSDPGHKIKSMDPKMIATRVEKIKKEHADTWFVDNNHPYQSFRYVGSYVTDDVTPGGQTVNPLMRKMMWPWETVGGVVNFMMTDVSTYAQQKVLREKVDTLSPEPPNDIQRVNRWITEFLCASFMRRGLKPRILTMEQYINNVKSSAAIGSWSSDVPWSSVREALADKRFHQMVEEERKLHLAGDCRMCVYNTMGKKEKKPSAMGVAKGSRTIWYMWLGSRFLEYEALGFLNEDHWVSRDNLACGVGGVGVNYFGYYLQEIARKGKFFIADDIAGWDTRINESDLADEEFLIMSLICDPYHRSLAKAVFRFAYQNIVALFPRNHPGFGSGTVMDVVARTDQRGSGQVVTYALNTITNAKIQLGRMLEAEGLLDAHEHVIKKWLNDNGEEALSGMVVAGDDVVVATNNGNFSRSLRYLHLNGKIRKDIDPSLPSKVETNWEVVEFCSHHYHVMTLKDGRRIIVPCREQNEIIGRGRIQKGGLVTLAESACLAKAYGQMWALYFFHRRDLRMAFLAITSSVPIDWFPEGRTSWSIHQNKEWMTTEDMLRVWNTVWIQDNPWMEDKMEIENWRDIPYLPKSMDLKCGSLIGTKERAAWSKDLPSTVTAVRKIIDQDTKTENVYQDFLGGMGRFQTYTDPMATV
